(19) United States
(12) Patent Application Publication
(10) Pub. No.: US 2009/0269741 A1
(43) Pub. Date: Oct. 29, 2009

(54) Method for assessing traits selected from longissimus dorsi peak force, intramuscular fat, retail beef yield and net feed intake in bovine animals

(75) Inventors: William Barendse, Queensland (AU); Antonio Reverter-Gomez, Queensland (AU)

Correspondence Address: SUGHRUE MION, PLLC, 2100 PENNSYLVANIA AVENUE, N.W., SUITE 800, WASHINGTON, DC, 20037, US

(73) Assignees: MEAT & LIVESTOCK AUSTRALIA LIMITED, North Sydney (AU); COMMONWEALTH SCIENTIFIC AND INDUSTRIAL RESEARCH ORGANISATION, CAMPBELL (AU); DEPARTMENT OF PRIMARY INDUSTRIES FOR AND ON BEHALF OF THE STATE OF NEW SOUTH WALES, ORANGE (AU); TEH STATE OF QUEENSLAND THROUGH ITS DEPT OF PRIMARY INDUSTRIES AND FISHERIES, BRISBANE (AU)

(21) Appl. No.: 11/989,299

(22) PCT Filed: Jul. 26, 2006
(86) PCT No.: PCT/AU2006/001044

§ 371 Date: Dec. 29, 2008

(30) Foreign Application Priority Data
Jul. 26, 2005 (AU) 2005903955
Jul. 27, 2005 (AU) 2005903956
Jul. 28, 2005 (AU) 2005904041
Jul. 28, 2005 (AU) 2005904050
Aug. 16, 2005 (AU) 2005304422
Aug. 16, 2005 (AU) 2005904424
Aug. 16, 2005 (AU) 2005904425
Aug. 16, 2005 (AU) 2005904426
Aug. 26, 2005 (AU) 2005904658
Nov. 3, 2005 (AU) 2005906085
Nov. 3, 2005 (AU) 2005906086
Nov. 17, 2005 (AU) 2005906375
Nov. 17, 2005 (AU) 2005906376
Nov. 22, 2005 (AU) 2005906472
Nov. 22, 2005 (AU) 2005906473
Nov. 23, 2005 (AU) 2005906531
Nov. 23, 2005 (AU) 2005906532

(51) Int. Cl. C12Q 1/68; C07H 21/04

(52) U.S. Cl. 435/6; 536/24.31; 536/24.33

(57) ABSTRACT

A method for assessing a trait in a bovine animal selected from the group consisting of longissimus dorsi peak force, intramuscular fat, retail beef yield and net feed intake, comprising the steps of: (1) providing a nucleic acid from the bovine animal or carcass; (2) assaying for the occurrence of a single nucleotide polymorphism (SNP), wherein the identification of said nucleotide occurrence as set forth herein is associated with variation in longissimus dorsi peak force, intramuscular fat deposition, retail beef yield or net feed intake.

### TECHNICAL FIELD

[0001] The present invention is concerned with a method for assessing selected traits in bovine animals. In particular it is concerned with a method for assessing traits selected from (1) longissimus dorsi peak force (LDPF), which is also referred to as Warner-Bratzler shear force (WBS) and is a measure of meat tenderness in the longissimus dorsi muscle which is indicative of the characteristic known to consumers (and referred to herein) as “meat tenderness” (2) intramuscular fat deposition in animals, which in turn influences the characteristic of “marbling” in meat (3) retail beef yield (RBY) and (4) net feed intake (NFI). The invention is useful for the selection of animals which show desirable meat tenderness traits either for breeding or to select animals destined to be slaughtered for food; in the selection of animals for ability to produce high levels of marbling in meat; for the selection of animals which show desirable traits in RBY either for breeding or in feed lot processing; and in the selection of animals for efficiency of utilisation of feed with a view to producing cattle that eat less for the same liveweight gain.

### BACKGROUND ART

[0002] The characteristics of meat tenderness, intramuscular fat, retail beef yield and net feed intake are key characteristics of cattle which influence consumer demand and the economics of beef production.

[0003] Meat tenderness is an important issue for consumers, and one which can influence demand sufficiently for an especially tender meat to command a premium price in the marketplace. The physiological change in muscle structure during the post-mortem period is complex but clearly seems to be at least one factor in meat tenderness.

[0004] It has been theorised that an endogenous, calcium-dependent proteinase, calpain, initiates in vivo muscle protein degradation. In particular, calpain is believed to be responsible for the breakdown of myofibril protein, which is closely related to meat tenderness. The protein calpastatin regulates calpain activity. The action of lysyl oxidase is to initiate cross-link formation in collagen fibrillogenesis. Our International Publication No. 02/064820 describes a method for assessing tenderness in beef by testing for genetic markers in the gene encoding calpastatin (CAST) and/or the gene encoding lysyl oxidase (LOX).

[0005] Even so, there is no comprehensive system for improving meat tenderness using genetic markers.

[0006] The manner in which animals metabolise fat is of considerable economic significance in agriculture and animal husbandry. In some markets a high content of fat in meat, in the form of small fat deposits or “marbling”, is regarded as highly desirable, and so efforts are made to induce heavy marbling of meat in cattle. In particular, the animals may be grain fed for at least a short period prior to marketing and slaughter. In other markets a very lean meat is preferred. Thus there is a need for methods by which the propensity of bovine animals to deposit fat in muscle can be assessed.

[0007] Intramuscular or marbling fat is deposited in cattle between the fascicules of muscles, and usually develops when animals are fed a high calorie diet for a long time. The quantity of marbling fat is expressed either as a lipid concentration or as a standardised marbling score (eg. the Australian AUSMEAT standard). Unlike fat deposited in subcutaneous and renal depots, marbling fat is deposited continuously until relatively late in the development of the animal, and the amount of this fat is strongly correlated with the number of fat cells or adipocytes found in the muscle fascicules. Although some of the factors that are important in the differentiation of adipocytes are known, the genetic factors that are involved in the difference between individuals in differentiation and development of the interfascular adipocytes and deposition of fat were unknown until recently, as were the genetic variants leading to a high or low marbling score.

[0008] The genetic basis of lipid metabolism has been investigated, and our International Publication WO99/23248 describes a method for assessing lipid metabolism in bovine animals in which DNA markers associated with (a) the 5′ untranslated region of the gene encoding thyroglobulin (b) the gene encoding the retinoic acid receptor gamma (RARG) and (c) the gene encoding 11-cis,9-cis retinol dehydrogenase (RDH5) were employed. In particular, some markers were associated with the increased fat deposition in muscle tissue. Polymorphisms in the retinoid related orphan receptor C(gamma) (RORC) have also been found to be associated with increased fat deposition in muscle tissue, as described in our International Publication No. WO2004/070055.

[0009] Thus, although a number of DNA markers associated with lipid metabolism and marbling effects have been reported, there is no comprehensive system for improving marbling.

[0010] Retail beef yield is the amount of meat that can be obtained from a carcass and sold. Clearly not all of a carcass can be sold for meat, and a substantial amount of fat is cut off and rendered while little of the bone is included in retail cuts. The skin, hooves and horns enter the by-product chain immediately. So the carcass weight of the animal is partitioned and the retail yield attracts much greater prices than that which enters the chain associated with by-products. Because the amount of fat and bone vary significantly between animals at any weight, purchasing cattle on final weight is not efficient and methods of predicting the amount of retail beef yield that would be obtained from the carcass are currently used, although some methods are of limited accuracy.

[0011] Retail beef yield can be measured through exhaustive boning out of carcasses, which is time consuming and expensive, and breeding can only be done indirectly through reference to breeding values of sires, who cannot be measured directly. It can be estimated with varying degrees of accuracy, either through VIASCAN technology or through a comparison of P8 fat thickness and carcass weight. By their nature, this does not allow animals to be selected accurately at feedlot entry, and breeding using these methods requires strong feedback from processors to producers. Such feedback usually can occur in vertically integrated enterprises to enhance breeding.

[0012] There are no DNA markers currently implemented for retail beef yield.

[0013] It has long been a goal of world producers to select directly for feed efficiency. The trait is a key element of beef farming profitability, given that about 80% of feed resources in a cattle breeding enterprise are consumed by breeding females. Increased feed efficiency also relates to the sustainability of beef farming in areas where feed resources are scarce or pastures poor.

[0014] While the breeding objective is improvement of feed conversion efficiency, the trait used to measure the phenomenon is referred to as “net feed intake” (NFI). In simple terms, this is the amount of feed a cattle beast eats, under or over the amount predicted from the animal's size (weight) and growth rate. The more efficient cattle are those with a lesser net feed intake for the same weight gain i.e. the more efficient cattle eat less than the animal's size and growth rate would suggest.

[0015] Net feed intake is expensive and difficult to measure. It may cost up to $300 per animal, and there are limited accredited facilities where the test can be made. Individual feed intakes are currently measured over a set test period of seventy (70) days, during which time standard, medium energy hay and grain ration is offered. Test cattle are weighed regularly and their intakes compared with their growth performance to determine if they have eaten more or less than expected. NFI results are reported as kilograms of feed eaten per day, and generally expressed as an amount above or below the breed average. The more negative the number the more efficient is the animal (and its progeny) in feed utilisation.

[0016] Since net feed intake is moderately heritable, the trait can be improved by direct selection. In view of the difficulty of measuring net feed intake directly, a gene marker test for the trait would be desirable.

[0017] The use of a blood test for insulin-like growth factor (IGF-1) is described in the National Beef Recording Scheme BREEDNOTE 04/1—January 2004. IGF-1 is moderately heritable (0.4) and correlated to NFI (0.6 low IGF-1, more efficient). The test is currently applicable to Angus and Hereford herds, and it is expected that other breeds will follow as data becomes available. However, the test lacks precision and still requires that some cattle be measured for feed intake.

### SUMMARY OF THE INVENTION

[0018] The present inventor has identified a number of single nucleotide polymorphisms (SNP) which act as genetic markers for longissimus dorsi peak force (LDPF), which is indicative of meat tenderness, intramuscular fat deposition, which is indicative of marbling, retail beef yield and net feed intake characteristics. Thus the invention allows a rapid and precise test for genetic variation for the relevant trait, which would allow many cattle to be tested over a short period of time, in a cost effective manner, to establish these characteristics.

[0019] In a first aspect of the present invention there is provided a method for assessing a trait in a bovine animal selected from the group consisting of longissimus dorsi peak force, intramuscular fat, retail beef yield and net feed intake and/or its component traits, comprising the steps of:

[0020] (1) providing a nucleic acid from the bovine animal or carcass;

[0021] (2) assaying for the occurrence of a single nucleotide polymorphism (SNP) identified in any one of SEQ ID Nos: 1 to 1635, wherein the identification of said nucleotide occurrence as set forth (a) in any one of SEQ ID NOs: 1171 to 1631 is associated with variation in longissimus dorsi peak force, (b) in any of SEQ ID Nos: 214 to 842 is associated with intramuscular fat deposition, (c) in any one of SEQ ID NOs: 843 to 1170 is associated with retail beef yield and (d) in any one of SEQ ID NOs: 1 to 213 or 632 to 1635 is associated with net feed intake and/or its component traits.

[0022] It will be appreciated that the association of an allele or genotype with increased value will often apply across breeds and families within breeds. However, a particular allele or genotype may not always be associated with increased values across breeds; in one breed the allele or genotype might be associated with an increased value but in another breed it might be associated with decreased value or not be associated with difference in value. The person skilled in the art will be able to establish the direction of the association.

[0023] Advantageously the assay is a quantitative assay which is capable of determining the number of copies of each form of the SNP in the nucleic acid sample. In an embodiment the assay is a polymerase chain reaction (PCR) which employs unique primers designed to amplify the DNA molecules set forth in SEQ ID Nos: 1 to 1635 or a portion of these which contains the SNP, and complements thereof. However, other DNA based methods such as primer extension and oligonucleotide ligation assays could be used. Suitable methods for amplification of DNA of known sequence are well understood by the person skilled in the art, and application of such techniques is widely described, for example, in WO03/031592 (the contents of which are incorporated herein by reference).

[0024] According to a further aspect of the present invention there is provided a method for selecting a bovine animal within a population of bovine animals, comprising the steps of:

[0025] (1) providing a nucleic acid sample from the bovine animal;

[0026] (2) assaying for the occurrence of a single nucleotide polymorphism (SNP) identified in any one of SEQ ID Nos: 1 to 1635, wherein the identification of said nucleotide occurrence as set forth (a) in any one of SEQ ID NOs: 1171 to 1631 is associated with variation in longissimus dorsi peak force, (b) in any of SEQ ID Nos: 214 to 842 is associated with intramuscular fat deposition, (c) in any one of SEQ ID NOs: 843 to 1170 is associated with retail beef yield and (d) in any one of SEQ ID NOs: 1 to 213 or 1632 to 1635 is associated with net feed intake and/or its component traits; and

[0027] (3) selecting a bovine animal exhibiting the desired trait.

[0028] An animal selected on this basis may be sorted from the remaining population of bovine animals and managed differently in order to maximise the physical characteristic of the animal. The animal selected by this method may be selected for purposes of breeding from said animal, or a progenitor cell from an animal which exhibits this characteristic may be used in a method for cloning bovine animals.

[0029] The single nucleotide polymorphisms of the invention are set forth in the Tables which follow, and a sequence listing providing a description of the polymorphism and giving 3′ & 5′ flanking sequence has been filed in electronically. The correlation between the SEQ ID Nos and the polymorphisms of the invention are recited in the various tables. Therefore, in an embodiment the present invention involves detecting a part of any one of the nucleic acids as set forth in SEQ ID Nos: 1 to 1635.

[0030] According to a further aspect of the present invention there is provided a solid substrate or surface comprising a plurality of nucleic acids in separate physical locations, including at least one nucleic acid as set forth in SEQ ID NO: 1 to 1635, or fragments of at least 10 contiguous nucleotides which contain the polymorphism, immobilised thereon. For example, the nucleic acids of the present invention, or part of their sequence, may be used as a part or the whole of a microarray.

[0031] Additionally, primers or probes may be designed as described therein to hybridize to any one of SEQ ID NO: 1 to 1635 or a complementary sequence thereto.

[0032] According to a further aspect of the present invention there is provided a kit for assessing a trait in a bovine animal selected from the group consisting of longissimus dorsi peak force, intramuscular fat, retail beef yield and net feed intake and/or its component traits through detection of the occurrence of a single nucleotide polymorphism (SNP), wherein the identification of said nucleotide occurrence as set forth (a) in any one of SEQ ID NOs: 1171 to 1631 is associated with variation in longissimus dorsi peak force, (b) in any of SEQ ID Nos: 214 to 842 is associated with intramuscular fat deposition, (c) in any one of SEQ ID NOs: 843 to 1170 is associated with retail beef yield and (d) in any one of SEQ ID NOs: 1 to 213 or 1632 to 1635 is associated with net feed intake and/or its component traits, comprising an oligonucleotide probe, primer or primer pair, or combinations thereof, for determining the nucleotide occurrence of the SNP.

[0033] Advantageously the kit further comprises one or more detectable labels.

[0034] According to a further aspect of the present invention there is provided an oligonucleotide probe, primer or primer pair for detecting the occurrence of a single nucleotide polymorphism as set forth in any one of SEQ ID Nos: 1 to 1635.

[0035] According to a still further aspect of the invention there is provided a method for assessing a trait in a bovine animal selected from the group consisting of longissimus dorsi peak force, intramuscular fat, retail beef yield and net feed intake and/or its component traits, comprising the steps of:

[0036] (1) providing a nucleic acid from the bovine animal or carcass;

[0037] (2) assaying for the occurrence of a polymorphism in a gene, including in the coding sequences, the introns, promotors and other regulatory sequences of said gene, or a polymorphism in linkage disequilibrium with a polymorphism in said gene, wherein said gene is selected from the group consisting of CLCA4 to CLCA3, ABCC4, RPL11, TULP3, TRPC4, C6orf32, TPT1, GTF3C2, SLC6A15, CTNNA3, DDX46, HS2ST1, NDUFS3, PMS2, TMEM47, CEP1, CAP2, IMPG2, BAZ2B, SENP7, IMPG2, EFCBP2, DCP2, XBPP1, LAMA3, Synaptotagmin X (SYT 10), DMD, EMR2, ZNF33A, DNM1L, GBAS, SEC5L1, ATP1A1, YES1, BSN, POU4F1, SLIT3, ROBO1, KRT1-23, DDX10, GRM1 and BAAT, wherein the identification of said nucleotide occurrence (a) in any one of CLCA4 to CLCA3, ABCC4, RPL11, TULP3, TRPC4 and C6orf32 is associated with variation in longissimus dorsi peak force, (b) in any of TPT1, GTF3C2, SLC6A15, CTNNA3, DDX46, HS2ST1, NDUFS3, PMS2 and TMEM47 is associated with intramuscular fat deposition, (c) in any one of CEP1, CAP2, IMPG2, BAZ2B, SENP7, IMPG2, EFCBP2, DCP2, XBPP1 and LAMA3 is associated with retail beef yield and (d) in any one of Synaptotagmin X (SYT 10), DMD, EMR2, ZNF33A, DNM1L, GBAS, SEC5L1, ATP1A1, YES1, BSN, POU4F1, ROBO1, KRT1-23, DDX10 and BAAT is associated with net feed intake and/or its component traits.

[0038] According to a still further aspect of the invention there is provided a method for selecting a bovine animal within a population of bovine animals, comprising the steps of:

[0039] (1) providing a nucleic acid sample from the bovine animal;

[0040] (2) assaying for the occurrence of a polymorphism in a gene, including in the coding sequences, the introns, promotors and other regulatory sequences of said gene, or a polymorphism in linkage disequilibrium with a polymorphism in said gene, wherein said gene is selected from the group consisting of CLCA4 to CLCA3, ABCC4, RPL11, TULP3, TRPC4, C6orf32, TPT1, GTF3C2, SLC6A15, CTNNA3, DDX46, HS2ST1, NDUFS3, PMS2, TMEM47, CEP1, CAP2, IMPG2, BAZ2B, SENP7, IMPG2, EFCBP2, DCP2, XBPP1, LAMA3, Synaptotagmin X (SYT 10), DMD, EMR2, ZNF33A, DNM1L, GBAS, SEC5L1, ATP1A1, YES1, BSN, POU4F1, SLIT3, ROBO1, KRT1-23, DDX10, GRM1 and BAAT, and wherein the identification of said nucleotide occurrence (a) in any one of CLCA4 to CLCA3, ABCC4, RPL11, TULP3, TRPC4 and C6orf32 is associated with variation in longissimus dorsi peak force, (b) in any of TPT1, GTF3C2, SLC6A15, CTNNA3, DDX46, HS2ST1, NDUFS3, PMS2 and TMEM47 is associated with intramuscular fat deposition, (c) in any one of CEP1, CAP2, IMPG2, BAZ2B, SENP7, IMPG2, EFCBP2, DCP2, XBPP1 and LAMA3 is associated with retail beef yield and (d) in any one of Synaptotagmin X (SYT 10), DMD, EMR2, ZNF33A, DNM1L, GBAS, SEC5L1, ATP1A1, YES1, BSN, POU4F1, ROBO1, KRT1-23, DDX10 and BAAT is associated with net feed intake and/or its component traits; and

[0041] (3) selecting a bovine animal exhibiting enhancement of the desired trait.

[0042] According to a still further aspect of the invention there is provided a kit for assessing a trait in a bovine animal selected from the group consisting of longissimus dorsi peak force, intramuscular fat, retail beef yield and net feed intake and/or its component traits through detection of the occurrence of a single nucleotide polymorphism (SNP) in a gene, including in the coding sequences, the introns, promotors and other regulatory sequences of said gene, or a polymorphism in linkage disequilibrium with a polymorphism in said gene, wherein said gene is selected from the group consisting of CLCA4 to CLCA3, ABCC4, RPL11, TULP3, TRPC4, C6orf32, TPT1, GTF3C2, SLC6A15, CTNNA3, DDX46, HS2ST1, NDUFS3, PMS2, TMEM47, CEP1, CAP2, IMPG2, BAZ2B, SENP7, IMPG2, EFCBP2, DCP2, XBPP1, LAMA3, Synaptotagmin X (SYT 10), DMD, EMR2, ZNF33A, DNM1L, GBAS, SEC5L1, ATP1A1, YES1, BSN, POU4F1, SLIT3, ROBO1, KRT1-23, DDX10, GRM1 and BAAT, and wherein the identification of said nucleotide occurrence (a) in any one of CLCA4 to CLCA3, ABCC4, RPL11, TULP3, TRPC4 and C6orf32 is associated with variation in longissimus dorsi peak force, (b) in any of TPT1, GTF3C2, SLC6A15, CTNNA3, DDX46, HS2ST1, NDUFS3, PMS2 and TMEM47 is associated with intramuscular fat deposition, (c) in any one of CEP1, CAP2, IMPG2, BAZ2B, SENP7, IMPG2, EFCBP2, DCP2, XBPP1 and LAMA3 is associated with retail beef yield and (d) in any one of Synaptotagmin X (SYT 10), DMD, EMR2, ZNF33A, DNM1L, GBAS, SEC5L1, ATP1A1, YES1, BSN, POU4F1, ROBO1, KRT1-23, DDX10 and BAAT is associated with net feed intake and/or its component traits, comprising an oligonucleotide probe, primer or primer pair, or combinations thereof, for determining said nucleotide occurrence.

[0043] The invention is therefore also concerned, in further aspects, with animals when selected by the method of the invention, their progeny and the use of both selected animals and their progeny for breeding as well as meat from these animals.

[0044] The methods of the invention are applicable to bovine animals including but not limited to cattle, water buffalo and bison.

[0045] As used herein it will be understood that NFI is a composite phenotype measured as a function of three primary traits, namely (1) daily feed intake; (2) average daily gain during the feeding period; and (3) body weight (or typically metabolic mid-weight). This being stated, it is anticipated that some users of this technology will be interested in using the gene tests at the primary trait level. DNA markers for NFI will have greater or lesser impacts on the primary traits depending upon the DNA marker.

[0046] This specification contains nucleotide and amino acid sequence information prepared using PatentIn Version 3.3. Each nucleotide sequence is identified in the sequence listing by the numeric indicator <210> followed by the sequence identifier (e.g. <210>1, <210>2, <210>3, etc). The length and type of sequence (DNA, protein (PRT), etc), and source organism for each nucleotide sequence, are indicated by information provided in the numeric indicator fields <211>, <212> and <213>, respectively. Nucleotide sequences referred to in the specification are defined by the term “SEQ ID NO:”, followed by the sequence identifier (e.g., SEQ ID NO: 1 refers to the sequence in the sequence listing designated as <210>1 and the sequence information immediately follows the identifier <400>1). In the sequences the symbols Y, R, M, K, S and W have been used to indicate the polymorphism. Thus the symbol “M” represents an A/T polymorphism, and so on. In general the polymorphism occurs at position 201 or position 51, depending on whether 200 nucleotides of 50 nucleotides of flanking sequence have been added. The sequence flanking the polymorphism is derived from publicly available sequence information. The present invention is not restricted to detection of the entire nucleotide sequence or in any way restricted to use of the entire nucleotide sequence. This information is presented to assist in the design of oligonucleotide premiers and probes, but the person skilled in the art will recognize that such sequence may contain errors and will adjust their design accordingly.

[0047] The designation of nucleotide residues referred to herein are those recommended by the IUPAC-IUB Biochemical Nomenclature Commission, wherein A represents Adenine, C represents Cytosine, G represents Guanine, T represents Thymine, Y represents a pyrimidine residue, R presents a purine residue, M represents Adenine or Cytosine, K represents Guanine or Thymine, S represents Guanine or Cytosine, W represents Adenine or Thymine, H represents a nucleotide other than Guanine, B represents a nucleotide other than Adenine, V represents a nucleotide other than Thymine, D represents a nucleotide other than Cytosine and N represents any nucleotide residue.

[0048] Throughout this specification, unless specifically states otherwise or the context requires otherwise, reference to a single step, composition of matter, group of steps or group of compositions of matter shall be taken to encompass one and a plurality (i.e. one or more) of those steps, compositions of matter, groups of steps or group of compositions of matter.

[0049] As used herein any range of numerals includes all within the range and the term “at least one” means one, two, three, four, etc. up to the possible maximum. Therefore a reference to one or more SNPs includes one SNP or any number of SNPs from two to the total number of SNPs set forth herein. The SNPs set forth herein can be used alone or in any combination, therefore the invention envisages detection of any of the possible combinations of SNPs set forth herein.

[0050] As used herein the term “cow” is used to refer to an individual animal without an intention to limit by gender and should not be taken to do so unless it is necessary from the context to infer that a female animal is referred to. The term should also be taken to encompass a young animal of either gender.

[0051] The present invention is not be limited in scope by the specific embodiments described herein, which are intended for the purpose of exemplification only. Functionally-equivalent products, compositions and methods are clearly within the scope of the invention, as described herein.

[0052] The present invention may be performed following the description herein without undue experimentation using, unless otherwise indicated, conventional techniques of molecular biology. Such procedures are described in various publications referred to throughout the specification, and the content of each such publication is incorporated herein by reference.

[0053] Throughout this specification and the claims, the words “comprise”, “comprises” and “comprising” are used in a non-exclusive sense, except where the context requires otherwise.

[0054] It will be clearly understood that, although a number of prior art publications are referred to herein, this reference does not constitute an admission that any of these documents forms part of the common general knowledge in the art, in Australia or in any other country.

[0055] Those skilled in the art will appreciate that the invention described herein is susceptible to variations and modifications other than those specifically described. It is to be understood that the invention includes all such variations and compounds referred to or indicated in this specification, individually or collectively, and any and all combinations or any two or more of said steps or features.

### DETAILED DESCRIPTION OF THE INVENTION

[0056] The methods of the invention allow for the management of bovine animals including selection of animals for breeding or cloning. The methods allow the identification of animals with favourable LDPF, intramuscular fat deposition, retail beef yield and/or net feed intake characteristics. Favourable characteristics may be present in certain animals singly or in combination, and measurement of these traits allows management of individual animals possessing one or more of these traits to maximise the individual potential performance. In particular, the methods of the invention allow management of feed intake, diet composition and diet related factors such as administration of food additives, feeding methods and management such as introduction of feed lots so that an individual animal may be treated in the most appropriate manner to produce meat of appropriate quality when slaughtered.

[0057] The principal commercial bovine animals are cattle, and there are many breeds of cattle. In an embodiment the cow is a breed (or cross) selected not exclusively from the group consisting of Angus, Ankole-Watusi, Ayrshire, Bazadaise, Beefalo, Beefmaster, Belgian Blue, Belmont Red, Blonde d'Aquitaine, Bonsmara, Braford, Brahman, Brahmousin, Brangus, Braunvieh, British White, American Brown Swiss, BueLingo, Charolais, Chianina, Corriente, American Devon, Dexters, Droughtmaster, Galloway, Gelbvieh, Guernsey, Hereford, Highland, Holstein, Jersey, Limousin, Lowline, Maine-Anjou, Marchigiana, Milking Shorthorn, Montebeliarde, Murray Grey, Normande, Parthenaise, Piedmontese, Pinzgauer, Romagnola, Salers, Salorn, Santa Gertrudis, Shetland, Shorthorn, Simmental, South Devon, Tarentaise, Texas Longhorn and Wagyu, most particularly Angus, Shorthorn, Hereford, Murray Grey, Brahman, Belmont Red and Santa Gertrudis.

[0058] Furthermore it will be appreciated that the association of an allele or genotype with increased value will often apply across breeds and families within breeds. However, a particular allele or genotype may not always be associated with increased values across breeds; in one breed the allele or genotype might be associated with an increased value but in another breed it might be associated with decreased value or not be associated with difference in value. The person skilled in the art will be able to establish the direction of the association.

[0059] Therefore, appropriate identification of traits in a particular species or breed allows for maximisation of physical characteristics of the animal to obtain meat with desirable tenderness and/or marbling characteristics and/or from animals with higher retail beef yield and/or low net feed intake and/or its component traits. Thus quality of the product and economics of its production may be adjusted either for an individual animal by management of that animal or through breeding and/or cloning of animals with desirable characteristics.

[0060] Single nucleotide polymorphisms are allelic variants that occur in a population where a single nucleotide difference is present at a locus. The method of the invention can involve detection of one single nucleotide polymorphism or more than one single nucleotide polymorphism, and can involve detection of single nucleotide polymorphisms which form or are a part of a haplotype which, as used herein, refers to groupings of two or more single nucleotide polymorphisms that are physically present in the same chromosome and tend to be inherited together except when recombination occurs. Methods for identifying haplotype alleles in nucleic acid samples are known to the person skilled in the art. This is from methods for haplotyping are described in WO 2005/040400, the contents of which are incorporated herein by reference.

[0061] A preferred sample for performing the method of the invention is a readily accessible sample that comprises genomic DNA. For example, genetic testing of cattle is often performed using a hair follicle, for example, isolated from the tail of an animal to be tested.

[0062] Other examples of readily accessible samples include, for example, bodily fluids or an extract thereof or a fraction thereof. For example, a readily accessible bodily fluid includes, for example, whole blood, saliva, semen or urine.

[0063] In another embodiment, a biological sample comprises a cell or cell extract or mixture thereof derived from a tissue such as, for example, skin.

[0064] Preferably, a biological sample has been isolated or derived previously from a subject by, for example, surgery, or using a syringe or swab.

[0065] Cell preparations or nucleic acid preparation derived from such tissues or cells are not to be excluded. The sample can be prepared on a solid matrix for histological analyses, or alternatively, in a suitable solution such as, for example, an extraction buffer or suspension buffer, and the present invention clearly extends to the testing of biological solutions thus prepared.

[0066] Analysis of the sample may be carried out by a number of methods. The present invention has identified a number of SNPs associated with traits in bovine animals, and subsequently detecting the presence or absence of the favourable allelic form of each SNP, or a plurality of these SNPs can be done using methods known in the art. Such methods may employ one or more oligonucleotide probes or primers including, for example, an amplification primer pair that selectively hybridize to a target polynucleotide which comprises a part or all of the sequence set forth in any one of SEQ ID Nos:1 to 1635. Oligonucleotide probes useful in an embodiment of the invention comprise an oligonucleotide which is complementary to and spans a portion of the polynucleotide including the SNP in question. Therefore, the presence of a specific nucleotide at the position (i.e. one of the allelic forms of the SNP) is detected by the ability or otherwise for the probe to hybridize. Such a method can further include contacting the target polynucleotide and hybridized oligonucleotide with an endonuclease and detecting the presence or absence of a cleavage product of the probe.

[0067] An oligonucleotide ligation assay also can be used to identify a nucleotide occurrence at a polymorphic position, wherein a pair of probes that selectively hybridize upstream and adjacent to and downstream and adjacent to the site of the SNP are prepared, and wherein one of the probes includes a terminal nucleotide complementary to a nucleotide occurrence of the SNP. Where the terminal nucleotide of the probe is complementary to the nucleotide occurrence, selective hybridization includes the terminal nucleotide such that, in the presence of a ligase, the upstream and downstream oligonucleotides are ligated. As such, the presence or absence of a ligation product is indicative of the nucleotide occurrence at the SNP site.

[0068] An oligonucleotide also can be useful as a primer, for example, for a primer extension reaction, wherein the product (or absence of a product) of the extension reaction is indicative of the nucleotide occurrence. In addition, a primer pair useful for amplifying a portion of the target polynucleotide including the SNP site can be useful, wherein the amplification product is examined to determine the nucleotide occurrence at the SNP site. Particularly useful methods include those that are readily adaptable to a high throughput format, to a multiplex format, or to both. The primer extension or amplification product can be detected directly or indirectly and/or can be sequenced using various methods known in the art. Amplification products which span a SNP loci can be sequenced using traditional sequence methodologies (e.g., the “dideoxy-mediated chain termination method,” also known as the “Sanger Method” (Sanger, F., et al. J. Molec. Biol. 94:441 (1975); Prober et al. Science 238:336-340 (1987)) and the “chemical degradation method,” also known as the “Maxam-Gilbert method” (Maxam, A. M., et al. Proc. Natl, Acad. Sci (U.S.A.) 74:560 (1977)), the contents of which are herein incorporated by reference to determine the nucleotide occurrence at the SNP loci.

[0069] As will be apparent to the person skilled in the art, the specific probe or primer used in an assay of the present invention will depend upon the assay format used. Methods of designing probes and/or primers for example, PCR or hybridization are known in the art and described, for example, in Dieffenbach and Dveksler (Eds) (In: PCR Primer: A Laboratory Manual, Cold Spring Harbour Laboratories, NY, 1995) and more recently in P.-Y. Kwok (Ed) (In: Methods in Molecular Biology Vol 212 Human Press, Totowa N.J., 2003). The various categories of polymorphism have been systematized and the various methods used to detect them have been thoroughly overviewed (BARENDSE and FRIES 1999). In short, there are only two kinds of polymorphism, those due to changes of DNA bases and those due to insertion and deletion of bases. Furthermore, the detection of these polymorphisms uses essentially the same technology and it is a rare technique that can be used for only one or the other of these kinds of polymorphism. Polymorphisms can also be divided into those that are in or near a sequence that is transcribed into RNA (type I polymorphisms) and those that are in DNA that is never translated into RNA (type II polymorphisms). However, all of these polymorphisms can be detected using the same kinds of methods. The methods for detecting DNA polymorphisms revolve around 3 major aspects, not all of which are used in every detection method, and some methods use techniques that are not one of these 3 major kinds. The point is that there are a large and ever increasing range of methods for detecting polymorphisms so it is not possible to be prescriptive about how the polymorphism should be detected, rather, it is the DNA sequence which lends itself to one or the other method of detection. Most of these methods are highly dependent upon the polymerase chain reaction (PCR), although it is possible to detect sequence differences easily without using the PCR. The three technologies are 1) separation of DNA by size or by composition, 2) oligonucleotide hybridisation to recognise specific DNA sequences, and 3) DNA visualisation. The DNA separation may be performed on solid matrices but may be performed in liquid matrices. The recognition of DNA sequence is usually performed by oligonucleotides of predefined sequence but may be performed enzymatically since some enzymes recognise specific DNA sequence motifs. DNA visualisation can be performed directly on the DNA which binds to some elements such as silver when it is visible in ordinary light, it may fluoresce under ultra violet light when it is bound to some molecules such as ethidium bromide, or it may be visualised through autoradiography when radioactive nucleotides are incorporated into the sequence. More usually, the DNA is visualised when it is bound to a DNA oligonucleotide which has a previously attached reporter molecule which may then be detected after laser excitation. Many methods depend on reporting the result of a specific reaction on the DNA, and may not even detect the DNA itself but remnants of the successful detection. These descriptions are merely to indicate the wide range and the many possible permutations of DNA detection, and do not exclude methods that have not been specifically referred to.

[0070] Some of the methods that might be used to detect the polymorphisms are described below, but they are not the only possible methods. While the specific hybridization of the probe or primer or other method for detecting variability to any nucleic acid can be predicted using well known rules, the probe or primer may not be unique if it is designed to bind to repetitive DNA sequence or to sequence common to members of a gene family, and so precautionary screening of probes and primers should be performed using, for example, BLAST against the cow and other genomes. In many cases this will not be sufficient and the adequacy of probes or primers may need to be confirmed empirically using methods known in the art. This same proviso will apply to all methods of detecting DNA that uses short probes and primers as would be appreciated by anyone skilled in the art.

[0071] The following is a list of some of the more useful current high throughput methods of detecting polymorphisms in cattle, but these should not be taken as an exhaustive list or be used to exclude new methods yet to be developed where they are essentially being used to identify the underlying DNA sequence. In that regard, if the DNA sequence has been transcribed to RNA and the RNA is tested for variation, or if the RNA has been translated to protein and the protein is tested for variation, these RNA and protein detection methods will also be methods of detecting the underlying DNA sequence. As indicated above, sometimes the detection method reports the result of a successful reaction without directly detecting the DNA molecule, and obviously this would apply for RNA and protein as well.

[0072] Some of the useful DNA based methods of detecting polymorphisms are the Taqman assay (LIVAK 2003), which uses competitive hybridisation of probes specific for the alternative DNA sequences and where a successful reaction is detected through the liberation of a reporter dye, the SNPlex assay (Applied Biosystems Incorporated, Foster City, Calif.) which uses the oligonucleotide ligation assay and where a successful reaction is reported via Zipchute probes that are separated on a capillary DNA sequencer, high throughput molecular inversion probes associated with generic microarray technologies (HARDENBOL et al. 2003; HARDENBOL et al. 2005), the MASSextend (STORM et al. 2002) or generic primer extension technologies (CHEN et al. 1997) which use mass spectrometry or laser fluorescence of the probe modified by an enzyme reaction respectively.

[0073] The present invention also relates to kits which can be used in the above described methods. Such kits typically contain an oligonucleotide probe, primer, or primer pair, or combinations thereof, depending upon the method to be employed. Such oligonucleotides are useful, for example, to identify a SNP as set forth herein. In addition, the kit may contain a control comprising oligonucleotides corresponding to the nucleotide sequence of the non-desired allelic form. In addition, the kit may contain reagents for performing a method of the invention such as buffers, detectable labels, one or more polymerases, which can be useful for a method that includes a primer extension or amplification procedure, and are nucleases for digesting hybridization products or a ligase which can be useful for performing an oligonucleotide ligation assay. The primers or probes can be included in the kit in labelled form.

[0074] The kit may also include instructions for use.

[0075] As well as management of the individual animal, the present invention allows for selection of animals for breeding programs. Thus a herd may be developed with desirable LDPF characteristics so as to have enhanced longissimus dorsi peak force, with desirable intramuscular fat deposition characteristics so as to increase the characteristic of marbling in meat, desirable beef yield in order to produce a herd with greater beef production characteristics and/or with reduced net feed intake to produce a herd with improved efficiency of freed use and therefore with favourable economic characteristics. As indicated previously, one or more of these traits may be selected for in the breeding program. Thus the method involves selected animals with desirable characteristics for one or more of these traits and using them in a breeding program. The progeny of the mating of selected parents are likely to contain the optimum combination of traits, thus creating a line of animals with specific characteristics. The progeny can then be used to breed and so on in order to continue the line, which may be monitored for purity using the original SNP markers.

[0076] Furthermore, the method of the invention allows for in vitro methods of producing animals. In general terms the method involves identification of one or more SNPs as set forth in SEQ ID Nos: 1 to 1635 in a bovine animal, isolating a progenitor cell from the animal and generating an animal from the progenitor cell. Methods of cloning bovine animals are well known to the person skilled in the art. For methods involved in cloning of cattle known methods may be used directly. As set forth, for example, in Willadsen “Cloning of sheep and cow embryos,” Genome 31:956 (1989), the contents of which are incorporated herein by reference.

[0077] In an embodiment, following development of an embryo, one or more cells is/are isolated therefrom and screened as described above. An embryo having or likely to have possess the desired trait or traits selected from longissimus dorsi peak force (LDPF), intramuscular fat deposition, retail beef yield (RBY) and net feed intake and/or its component traits (NFI) is then selected and implanted into a suitable recipient. In this manner, animals having or likely to have improved feeding efficiency are produced.

[0078] In an embodiment the selected animals are used to produce offspring using in vitro fertilization. In this process, ova are harvested from a cow comprising one or more SNP of the invention by, for example, transvaginal ovum pick-up (OPU) or by laparoscopic aspiration. The recovered ovum is then matured prior to fertilization. Zygotes are then cultured for a time and under conditions suitable for embryo development. For example, zygotes are cultured in a ligated oviduct of a temporary recipient (sheep or rabbit). Alternatively, zygotes are co-cultured in vitro with somatic cells (e.g., oviduct epithelial cells, granulosa cells, etc) in a defined medium. Alternatively, zygotes are cultured in vitro in a simple medium such as synthetic oviductal fluid without any somatic cell support.

[0079] The method is amenable to screening embryos produced using any assisted breeding technology and/or for screening embryos produced using an ovum and/or sperm from an animal that has not been screened using the method of the invention.

### EXAMPLE 1

### DNA Samples and Phenotypes

[0080] The net feed intake score for each animal was calculated. NFI is a predicted value based on a linear model and is not a raw measurement of the animal. All the animals were ranked from highest to lowest NFI and the top 200 and bottom 200 were extracted. For each of the herds of each of the seven breeds, an animal in the top 200 was matched to an animal in the bottom 200 (i.e. extremes) from the same herd with animals matched as best as possible to ensure that opposite animals represented a range of cohorts and market end points, and that high NFI was not systematically confounded with for example market or cohort when compared to animals of low NFI. After the DNA was quantified, some animals were found to have insufficient DNA to genotype 10,000 SNP, so those DNA samples were replaced by an animal with enough DNA that was part of the same herd but that was as close as possible to being in the opposite extreme 200 if an opposite extreme was not available. The final sample represents 41 Angus, 21 Brahman, 24 Belmont Red, 28 Hereford, 20 Murray Grey, 28 Santa Gertrudis and 27 Shorthorn animals. The 189 animals are 188 steers and 1 heifer and she was excluded from further analysis. These represent 142 sires with a range of 1 to 4 offspring per sire and a median of 1 offspring per sire. They represent 32 herds with a range of 1-12 animals per herd and a median of 5 steers per herd. They represent 37 kill groups with a range of 1-12 animals per kill group and a median of 4 per kill group. The contemporary group of each animal is its herd.kill_group.market.sex. The unadjusted NFI values for the sample range from −3.398 to 3.805 with a mean of 0.07 and standard deviation of 1.32. The total sample from which this sample was drawn had a mean of 0.00 and standard deviation of 0.75, showing that using the extremes increased the variability of the sample that was analysed. The mean of the one NFI extreme was −1.06 with a standard deviation of 1.63 (N=95) and the mean of the other NFI extreme was 1.21 with a standard deviation of 0.90 (N=94).

[0081] DNA was extracted from blood using Qiagen columns following the manufacturer's instructions. The DNA was quantified using fluorescence after the pico green dye was added to a small sample. The DNA was also quantified using UV spectrophotometry and the purity determined using the ratio of fluorescence at 260 versus 280 nm.

[0082] The samples were genotyped using the ParAllele 10K standard SNP panel. The method of SNP genotyping is documented in Hardenbol, P., Baner, J., Jain, M., Nilsson, M., Namsaraev, E. A., Karlin-Neumann, G. A., Fakhrai-Rad, H., Ronaghi, M., Willis, T. D., Landegren, U. and Davis, R. W. 2003 “Muliplex genotyping with sequence-tagged molecular inversion probes” Nature Biotechnology 21, 673-678 (2003), the contents of which are incorporated herein by reference. The panel of approximately 10,000 bovine SNP was derived from the publicly available DNA sequence and is called the MegAllele Genotyping Bovine 10K SNP Panel. The SNPs allow researchers to perform linkage mapping studies on bovine breeds with no bias towards either beef or dairy. The MegAllele Genotyping Bovine 10K SNP Panel is designed to work with the Affymetrix GeneChip Scanner 3000.

[0083] In the Examples that follow the person skilled in the art can determine from the Tables contained in this specification which genotype or allele is superior for any of traits listed. The genotypes have been coded in a consistent scheme so that this information could be retrieved irrespective of the actual bases at the single nucleotide polymorphism. Genotypes were coded as 0, 1, 2 and 5 where 5 is unknown, 1 is always the heterozygote, 0 is the homozygote higher up the alphabet and 2 is the homozygote lower down the alphabet—so CC is 2 when AA is the alternative homozygote, so the genotypes for an A/C SNP, with genotypes AA, AC and CC, are coded as 0, 1 and 2 respectively. For a C/G SNP, with genotypes CC, CG and GG the homozygote CC is now coded as 0, the CG heterozygote as 1 and the GG homozygote as 2.

[0084] In the Tables showing the effect of each SNP, the mean values for each genotype is given as mean_{—}0 for genotype 0, mean_{—}1 for genotype 1, and mean_{—}2 for genotype 2. These show clearly the performance of each genotype. In addition, to make the information more digestible, the additive effect a of each SNP, its dominance deviation k, and alpha the average effect of allele substitution are also given. A minus value for a means the mean of genotype 0 is lower than the mean of genotype 2, and a minus value for alpha means that selecting for allele 0 will reduce the average values of the trait in the population. By comparing a and alpha for each SNP identifier, and by looking at the DNA sequence of the SNP, if, for example, the alpha is negative, and the SNP is, for example, a C/T SNP, that would mean that the C allele reduces the trait value in the population. If on the other hand, the alpha is positive, and the SNP is, for example a G/T SNP, that would mean that the T allele increases the trait value in the population.

### EXAMPLE 2

### Analysis of the Associations Between NFI and DNA Markers

[0085] Net feed intake is a commercially import trait of cattle that represents the efficiency with which cattle or other species can use feed. We genotyped divergent pairs of animals of extreme net feed intake, a few divergent pairs from each sire, spread across a range of contemporary groups for 7 breeds, Angus, Shorthorn, Hereford, Murray Grey, Brahman, Belmont Red and Santa Gertrudis or described in Example 1. We genotyped these animals for more than 9,200 single nucleotide polymorphisms (SNP) across the bovine genome spread at less than 350 kb average spacing using the ParAllele genotyping system (Table 1). We found initially 9 SNP with very strong statistical significance and approximately 80 SNP with statistical significance at a=0.01 threshold, as set out in Tables 2 and 3, respectively.

[0086] Since the data have many contemporary groups, breeds, cohorts and markets, the phenotypes were first analysed to determine if there were any systematic differences between these. The linear model:

Nfi=mean+line+breed(line)+market+line*market+error

[0087] was found to explain 20% of the variation. In line with this model, the least squares mean NFI values for each breed*line*market combination was calculated and the NFI of each animal was adjusted accordingly. The adjusted average NFI value of each genotype was calculated and at each locus, the alternative genotypic means with the largest difference was compared using at test. To determine the significance of the t test, 100,000 permutations of genotypes at each locus was calculated and the proportion that gave a larger t test was calculated. This proportion is a distribution free P value for each comparison.

TABLE 1
Associations between DNA markers and net feed intake sorted in decreasing order of statistical significance.

| Locus | Scaffold-v2 | bp | IBISS4/Scaffold-v1 | mean_0 | SD | mean_1 | SD | mean_2 |
|---|---|---|---|---|---|---|---|---|
| 343617 | Un.1536 | 47639 | SCAFFOLD35407_3401 | −0.09 | 1.75 | −0.22 | 1.78 | 1.95 |
| 345016 | Un.119 | 491520 | SCAFFOLD291452_7280 | −0.32 | 1.81 | −0.10 | 1.69 | 1.14 |
| 349388 | 16.105 | 599843 | SCAFFOLD261939_1026 | 0.14 | 1.84 | 0.29 | 1.46 | −2.51 |
| 346973 | 13.119 | 223176 | SCAFFOLD71532_708 | −0.78 | 1.53 | 0.64 | 1.42 | 0.20 |
| 353336 | Un.1206 | 229702 | SCAFFOLD352562_535 | 2.20 | 1.69 | 0.12 | 1.63 | −0.15 |
| 350549 | 22.79 | 313784 | SCAFFOLD85350_16238 | 1.14 | 1.80 | 0.27 | 1.77 | −0.58 |
| 347269 | 6.14 | 2529 | SCAFFOLD165450_8470 | −1.93 | 0.79 | 0.26 | 1.83 | 0.18 |
| 350155 | Un.1886 | 35221 | SCAFFOLD240520_5556 | 0.52 | 1.77 | −0.52 | 1.69 | 0.93 |
| 342650 | Un.1230 | 70874 | IBISS4snp540 | −0.03 | 1.82 | 0.30 | 1.70 | 2.37 |
| 347570 | Un.8737 | 23429 | SCAFFOLD260891_2797 | 1.07 | 1.79 | 0.01 | 1.67 | −0.29 |
| 351382 | Un.1849 | 124957 | SCAFFOLD115666_13006 | 0.12 | 1.73 | 0.46 | 1.87 | −1.76 |
| 345385 | Un.779 | 60958 | SCAFFOLD11677_746 | 0.00 | 1.79 | 0.72 | 1.86 | −0.47 |
| 352721 | Un.1579 | 208904 | SCAFFOLD216584_13710 | 0.04 | 1.82 | 0.68 | 1.62 | −2.00 |
| 351385 | 2.38 | 115438 | SCAFFOLD116234_3345 | 0.18 | 1.79 | −1.73 | 0.68 | 0.00 |
| 346924 | Un.1139 | 232148 | SCAFFOLD55122_7765 | 0.38 | 1.91 | 0.07 | 1.70 | −0.97 |
| 349252 | Un.1579 | 209055 | SCAFFOLD216584_13861 | 0.07 | 1.85 | 0.52 | 1.49 | −2.00 |
| 342920 | Un.1230 | 53481 | SCAFFOLD191247_3964 | 0.00 | 1.80 | 0.33 | 1.74 | 2.41 |
| 354212 | Un.1139 | 232366 | SCAFFOLD55122_7983 | 0.38 | 1.91 | 0.09 | 1.68 | −0.97 |
| 352371 | NULL | NULL | SCAFFOLD321814_14337 | 0.13 | 1.87 | 0.38 | 1.71 | −1.05 |
| 348465 | Un.284 | 1868 | SCAFFOLD2481_1870 | 0.09 | 1.76 | 0.57 | 1.97 | −1.96 |
| 342844 | Un.16 | 119868 | SCAFFOLD135269_17123 | 0.11 | 1.84 | 1.08 | 1.54 | −0.74 |
| 344428 | 12.82 | 302857 | SCAFFOLD86623_4947 | 0.27 | 1.82 | 0.25 | 1.85 | −0.95 |
| 345597 | Un.5189 | 28900 | SCAFFOLD193911_3423 | 0.00 | 0.00 | −0.91 | 1.54 | 0.25 |
| 348073 | Un.8037 | 17164 | SCAFFOLD110844_5365 | 0.00 | 0.00 | −1.01 | 1.69 | 0.26 |
| 353131 | Un.1610 | 62295 | SCAFFOLD171003_4691 | 0.55 | 1.95 | 0.05 | 1.65 | −0.53 |
| 350185 | 23.81 | 534485 | SCAFFOLD255402_26573 | 0.18 | 1.69 | −0.34 | 1.90 | 1.71 |
| 351885 | 20.56 | 298267 | SCAFFOLD6887_2230 | 0.22 | 1.83 | 0.16 | 1.68 | −1.42 |
| 352772 | 1.146 | 36918 | SCAFFOLD25159_19124 | −0.65 | 1.25 | 0.50 | 1.85 | −0.03 |
| 348908 | 6.1 | 269406 | SCAFFOLD10121_13105 | 0.03 | 1.82 | 1.24 | 0.82 | 0.00 |
| 348351 | Un.4426 | 43261 | SCAFFOLD20608_1008 | −0.94 | 1.09 | 0.51 | 1.88 | 0.05 |
| 351082 | Un.1038 | 100048 | SCAFFOLD301148_20414 | −0.55 | 1.52 | 1.98 | 0.71 | 0.15 |
| 347501 | 12.83 | 29538 | SCAFFOLD245021_7420 | −0.14 | 1.73 | 0.02 | 1.77 | 1.28 |
| 348678 | Un.310 | 515663 | SCAFFOLD325650_1207 | 0.03 | 1.82 | 0.93 | 1.57 | −1.34 |
| 350023 | Un.1100 | 235321 | SCAFFOLD190318_15654 | 0.00 | 0.00 | −0.94 | 1.37 | 0.23 |
| 352237 | 13.16 | 119108 | SCAFFOLD250157_11623 | −1.20 | 1.46 | 0.61 | 1.72 | −0.06 |
| 344238 | 10.82 | 1271166 | SCAFFOLD295006_45304 | −0.19 | 1.66 | 0.18 | 1.84 | 1.28 |
| 349640 | Un.3198 | 77113 | SCAFFOLD55648_3312 | −1.68 | 1.35 | 0.39 | 1.45 | 0.16 |
| 345533 | Un.4542 | 9983 | SCAFFOLD170036_23917 | −0.32 | 1.39 | 1.02 | 1.44 | 0.01 |
| 344822 | Un.11087 | 3391 | SCAFFOLD220929_12275 | 0.00 | 0.00 | 1.13 | 1.85 | −0.07 |
| 347653 | Un.1101 | 174909 | SCAFFOLD290984_3799 | 0.20 | 1.81 | −0.22 | 1.72 | −2.03 |
| 346024 | 2.18 | 667311 | SCAFFOLD49069_4838 | 0.04 | 1.83 | 0.71 | 1.60 | −0.51 |
| 354433 | 6.154 | 53376 | SCAFFOLD205065_7657 | 0.15 | 0.98 | −1.88 | 1.22 | 0.23 |
| 351039 | Un.323 | 78544 | SCAFFOLD285539_13746 | 2.10 | 0.10 | 0.18 | 1.96 | −0.01 |
| 346800 | Un.1661 | 15087 | SCAFFOLD305898_10192 | 0.25 | 1.79 | −0.95 | 1.55 | 0.00 |
| 346873 | 11.173 | 210285 | SCAFFOLD38607_6519 | −0.76 | 1.60 | 0.64 | 2.08 | 0.17 |
| 344576 | 3.162 | 380554 | SCAFFOLD115003_498 | −1.24 | 1.54 | 0.13 | 1.82 | 0.30 |
| 352302 | 6.71 | 1672 | SCAFFOLD284472_542 | 0.26 | 1.77 | 0.16 | 1.87 | −1.10 |
| 350934 | 4.134 | 1432811 | SCAFFOLD245150_4016 | 1.02 | 1.66 | −0.05 | 1.68 | −0.12 |
| 352079 | 7.78 | 485886 | SCAFFOLD15666_3538 | 0.25 | 1.86 | 0.72 | 1.93 | −0.42 |
| 343193 | 22.79 | 298472 | IBISS4snp651 | −0.51 | 1.53 | −0.05 | 1.85 | 0.58 |
| 347999 | Un.10660 | 8528 | IBISS4snp723 | 0.13 | 1.88 | −0.21 | 1.81 | 1.55 |
| 351114 | Un.71 | 171881 | SCAFFOLD317129_13923 | −0.06 | 1.67 | −0.24 | 1.75 | 0.93 |
| 344483 | 19.45 | 624431 | IBISS4snp347 | −0.50 | 1.72 | 0.67 | 1.82 | −0.02 |
| 349908 | 20.1 | 343146 | SCAFFOLD145774_16171 | 0.23 | 2.05 | 0.51 | 1.65 | −0.59 |
| 347029 | Un.9514 | 2997 | SCAFFOLD91431_3586 | 0.60 | 1.75 | 0.05 | 1.85 | −0.52 |
| 343763 | 1.1 | 1178440 | IBISS4snp160 | 0.73 | 1.77 | 0.11 | 1.81 | −0.34 |
| 351837 | 20.7 | 11561 | SCAFFOLD48045_564 | 2.05 | 1.42 | 0.18 | 1.79 | −0.10 |
| 346220 | Un.5571 | 12011 | SCAFFOLD100297_8761 | 0.00 | 0.00 | −1.47 | 1.06 | 0.18 |
| 343692 | 3.216 | 275639 | SCAFFOLD71577_11565 | −0.19 | 1.59 | 0.65 | 2.00 | −0.41 |
| 347727 | Un.5716 | 44061 | SCAFFOLD316858_23449 | −0.44 | 1.58 | 0.79 | 1.80 | 0.26 |
| 354067 | 9.37 | 404806 | SCAFFOLD321782_15219 | 1.06 | 1.83 | 0.00 | 0.00 | −0.06 |
| 350815 | Un.2354 | 93446 | SCAFFOLD185691_4123 | 0.15 | 1.83 | 0.41 | 1.85 | −0.61 |
| 348912 | Un.51 | 620188 | SCAFFOLD10204_22524 | 0.04 | 1.80 | 0.88 | 1.57 | −0.93 |
| 351157 | 6.133 | 323039 | SCAFFOLD40038_18553 | −2.01 | 0.42 | 0.40 | 1.75 | 0.07 |
| 350542 | Un.3710 | 57861 | SCAFFOLD85037_17745 | −1.90 | 0.53 | −0.27 | 1.73 | 0.24 |
| 343638 | 16.35 | 81505 | SCAFFOLD466_4857 | 0.84 | 1.64 | −0.22 | 1.94 | 0.04 |
| 351119 | 22.29 | 253978 | SCAFFOLD317870_2261 | −0.78 | 1.37 | 0.44 | 1.94 | 0.07 |
| 344670 | 14.31 | 47171 | SCAFFOLD155146_6104 | 0.19 | 1.67 | 0.45 | 1.94 | −0.57 |
| 352540 | Un.16478 | 4033 | SCAFFOLD113475_827 | 0.22 | 1.76 | −1.31 | 1.74 | 0.00 |
| 343870 | Un. 12834 | 3514 | SCAFFOLD122517_7619 | −0.60 | 1.72 | 0.31 | 1.76 | 0.44 |
| 345255 | Un.9514 | 3234 | SCAFFOLD91431_3349 | 0.60 | 1.81 | 0.03 | 1.79 | −0.54 |
| 351524 | Un.304 | 246845 | SCAFFOLD200011_13411 | −0.08 | 1.77 | 0.83 | 1.76 | 0.00 |
| 342878 | Un.465 | 523854 | SCAFFOLD155037_16984 | 0.31 | 1.75 | −0.55 | 1.72 | 0.00 |
| 348581 | 26.54 | 208100 | SCAFFOLD288338_3076 | 0.13 | 1.82 | −1.19 | 0.88 | 0.00 |
| 343301 | Un.9948 | 10551 | SCAFFOLD15017_7532 | 1.04 | 1.86 | −0.16 | 1.68 | 0.01 |
| 350386 | Un.2683 | 58065 | SCAFFOLD523674_1755 | −0.70 | 1.59 | 0.38 | 1.75 | 0.18 |
| 347069 | Un.4773 | 40061 | IBISS4snp426 | 0.24 | 1.79 | 0.20 | 1.80 | −1.05 |
| 354228 | Un.2727 | 71680 | SCAFFOLD75727_10291 | 0.16 | 1.84 | 0.68 | 1.64 | −0.46 |
| 353758 | Un.3746 | 22662 | SCAFFOLD130522_9733 | 0.12 | 1.83 | −0.23 | 1.87 | 0.91 |
| 351068 | Un.10812 | 19943 | SCAFFOLD295225_17655 | 0.00 | 0.00 | 0.91 | 1.67 | −0.07 |
| 348529 | 24.79 | 5587 | SCAFFOLD268943_3771 | −0.31 | 1.60 | −0.04 | 1.77 | 0.83 |
| 348917 | Un.3423 | 55305 | SCAFFOLD105096_24896 | 0.76 | 1.42 | −0.43 | 1.45 | 0.14 |
| 351930 | 17.51 | 218776 | SCAFFOLD95294_4333 | 1.23 | 1.94 | −0.09 | 1.75 | −0.14 |
| 354405 | 14.104 | 194338 | SCAFFOLD90324_3708 | 0.12 | 1.93 | 0.28 | 1.59 | −1.11 |
| 353697 | Un.2727 | 71795 | SCAFFOLD75727_10176 | 0.21 | 1.97 | 0.57 | 1.65 | −0.44 |

| Locus | SD | N | Freq | a | k | alpha | tmax | log(1/P) |
|---|---|---|---|---|---|---|---|---|
| 343617 | 1.40 | 150 | 0.72 | −1.02 | 1.13 | −1.53 | 8.193 | 5.0000 |
| 345016 | 1.62 | 169 | 0.57 | −0.73 | 0.70 | −0.80 | 6.250 | 4.0000 |
| 349388 | 0.46 | 170 | 0.89 | 1.32 | 1.11 | 2.47 | 12.560 | 3.6380 |
| 346973 | 1.95 | 162 | 0.30 | −0.49 | −1.90 | −0.86 | 5.926 | 3.4810 |
| 353336 | 1.72 | 170 | 0.20 | 1.18 | −0.77 | 1.71 | 7.326 | 3.3870 |
| 350549 | 1.78 | 136 | 0.44 | 0.86 | −0.01 | 0.86 | 5.975 | 3.3190 |
| 347269 | 1.76 | 170 | 0.19 | −1.05 | −1.08 | −1.76 | 9.065 | 3.2680 |
| 350155 | 1.62 | 169 | 0.61 | −0.21 | 6.07 | −0.48 | 5.848 | 3.1190 |
| 342650 | 0.53 | 166 | 0.86 | −1.20 | 0.73 | −1.82 | 10.398 | 3.0360 |
| 347570 | 1.79 | 169 | 0.40 | 0.68 | −0.56 | 0.76 | 5.464 | 3.0270 |
| 351382 | 1.15 | 161 | 0.80 | 0.94 | 1.36 | 1.71 | 7.703 | 2.9390 |
| 345385 | 1.43 | 168 | 0.61 | 0.23 | 4.06 | 0.45 | 5.156 | 2.8630 |
| 352721 | 0.58 | 168 | 0.88 | 1.02 | 1.63 | 2.28 | 10.619 | 2.8360 |
| 351385 | 0.00 | 170 | 0.98 | 0.09 | −20.22 | −1.66 | 9.224 | 2.7400 |
| 346924 | 1.38 | 167 | 0.68 | 0.68 | 0.54 | 0.80 | 5.456 | 2.6970 |
| 349252 | 0.58 | 169 | 0.88 | 1.03 | 1.43 | 2.17 | 10.343 | 2.6930 |
| 342920 | 0.19 | 169 | 0.88 | −1.21 | 0.73 | −1.87 | 11.746 | 2.6740 |
| 354212 | 1.38 | 170 | 0.67 | 0.68 | 0.57 | 0.81 | 5.500 | 2.6560 |
| 352371 | 1.32 | 169 | 0.71 | 0.59 | 1.42 | 0.95 | 5.753 | 2.6460 |
| 348465 | 0.21 | 170 | 0.92 | 1.02 | 1.47 | 2.28 | 9.250 | 2.6360 |
| 342844 | 1.09 | 164 | 0.88 | 0.42 | 3.28 | 1.50 | 5.819 | 2.5590 |
| 344428 | 1.22 | 169 | 0.71 | 0.61 | 0.97 | 0.86 | 5.188 | 2.4930 |
| 345597 | 1.78 | 169 | 0.08 | −0.12 | 8.28 | 0.74 | 4.656 | 2.4830 |
| 348073 | 1.76 | 170 | 0.06 | −0.13 | 8.77 | 0.86 | 4.630 | 2.4720 |
| 353131 | 1.56 | 168 | 0.57 | 0.54 | 0.07 | 0.55 | 4.697 | 2.4440 |
| 350185 | 1.10 | 169 | 0.79 | −0.77 | 1.68 | −1.50 | 7.210 | 2.4340 |
| 351885 | 1.19 | 170 | 0.81 | 0.82 | 0.93 | 1.30 | 5.987 | 2.4200 |
| 352772 | 1.83 | 169 | 0.35 | −0.31 | −2.71 | −0.56 | 5.029 | 2.4150 |
| 348908 | 0.00 | 170 | 0.97 | 0.01 | 81.67 | 1.17 | 5.742 | 2.4090 |
| 348351 | 1.79 | 170 | 0.21 | −0.49 | −1.93 | −1.05 | 5.681 | 2.4030 |
| 351082 | 1.83 | 166 | 0.14 | −0.35 | −6.23 | −1.93 | 8.609 | 2.3820 |
| 347501 | 1.78 | 170 | 0.68 | −0.71 | 0.77 | −0.90 | 5.090 | 2.3790 |
| 348678 | 0.17 | 163 | 0.93 | 0.69 | 2.31 | 2.04 | 9.543 | 2.3750 |
| 350023 | 1.82 | 169 | 0.06 | −0.12 | 9.17 | 0.82 | 4.640 | 2.3360 |
| 352237 | 1.79 | 170 | 0.24 | −0.57 | −2.18 | −1.22 | 5.982 | 2.3310 |
| 344238 | 1.85 | 169 | 0.71 | −0.73 | 0.50 | −0.89 | 4.995 | 2.3200 |
| 349640 | 1.84 | 168 | 0.14 | −0.92 | −1.25 | −1.74 | 6.354 | 2.3000 |
| 345533 | 1.87 | 154 | 0.20 | −0.17 | −7.12 | −0.86 | 4.973 | 2.2880 |
| 344822 | 1.74 | 169 | 0.09 | 0.04 | 33.29 | −0.93 | 4.260 | 2.2700 |
| 347653 | 0.23 | 169 | 0.90 | 1.11 | 0.62 | 1.67 | 10.070 | 2.2550 |
| 346024 | 1.72 | 170 | 0.72 | 0.28 | 3.44 | 0.70 | 4.686 | 2.2540 |
| 354433 | 1.81 | 160 | 0.07 | −0.04 | 51.75 | 1.76 | 6.174 | 2.2320 |
| 351039 | 1.71 | 169 | 0.18 | 1.05 | −0.82 | 1.60 | 11.656 | 2.2320 |
| 346800 | 0.00 | 168 | 0.94 | 0.12 | −8.60 | −0.83 | 4.412 | 2.2290 |
| 346873 | 1.69 | 153 | 0.27 | −0.47 | −2.01 | −0.89 | 4.769 | 2.2280 |
| 344576 | 1.74 | 170 | 0.29 | −0.77 | −0.78 | −1.02 | 5.330 | 2.2280 |
| 352302 | 1.35 | 169 | 0.72 | 0.68 | 0.85 | 0.94 | 5.130 | 2.1990 |
| 350934 | 1.83 | 170 | 0.32 | 0.57 | −0.88 | 0.75 | 4.597 | 2.1870 |
| 352079 | 1.47 | 159 | 0.55 | 0.33 | 2.40 | 0.42 | 4.478 | 2.1810 |
| 343193 | 1.77 | 168 | 0.40 | −0.54 | 0.16 | −0.53 | 4.566 | 2.1770 |
| 347999 | 0.55 | 153 | 0.85 | −0.71 | 1.48 | −1.44 | 7.289 | 2.1670 |
| 351114 | 1.97 | 163 | 0.62 | −0.49 | 1.36 | −0.66 | 4.478 | 2.1660 |
| 344483 | 1.74 | 170 | 0.32 | −0.24 | −3.88 | −0.57 | 4.560 | 2.1590 |
| 349908 | 1.57 | 169 | 0.46 | 0.41 | 1.68 | 0.35 | 4.424 | 2.1550 |
| 347029 | 1.64 | 163 | 0.55 | 0.56 | 0.02 | 0.56 | 4.479 | 2.1540 |
| 343763 | 1.70 | 168 | 0.46 | 0.54 | −0.16 | 0.54 | 4.404 | 2.1350 |
| 351837 | 1.75 | 170 | 0.23 | 1.07 | −0.74 | 1.51 | 6.433 | 2.1310 |
| 346220 | 1.82 | 158 | 0.04 | −0.09 | 17.33 | 1.35 | 5.786 | 2.1310 |
| 343692 | 1.52 | 169 | 0.62 | 0.11 | 8.64 | 0.33 | 4.500 | 2.1250 |
| 347727 | 1.93 | 167 | 0.66 | −0.35 | −2.51 | −0.07 | 4.528 | 2.1190 |
| 354067 | 1.76 | 156 | 0.17 | 0.56 | −0.89 | 0.89 | 4.036 | 2.1100 |
| 350815 | 1.45 | 170 | 0.56 | 0.38 | 1.68 | 0.46 | 4.408 | 2.1090 |
| 348912 | 1.77 | 168 | 0.86 | 0.49 | 2.73 | 1.43 | 5.013 | 2.0970 |
| 351157 | 1.81 | 168 | 0.14 | −1.04 | −1.32 | −2.03 | 10.490 | 2.0960 |
| 350542 | 1.80 | 170 | 0.11 | −1.07 | −0.52 | −1.51 | 8.347 | 2.0910 |
| 343638 | 1.64 | 164 | 0.41 | 0.40 | −1.65 | 0.52 | 4.368 | 2.0810 |
| 351119 | 1.74 | 169 | 0.29 | −0.43 | −1.87 | −0.76 | 4.782 | 2.0800 |
| 344670 | 1.62 | 169 | 0.56 | 0.38 | 1.68 | 0.46 | 4.336 | 2.0800 |
| 352540 | 0.00 | 170 | 0.95 | 0.11 | −12.91 | −1.18 | 4.452 | 2.0770 |
| 343870 | 1.81 | 160 | 0.45 | −0.52 | −0.75 | −0.56 | 4.292 | 2.0760 |
| 345255 | 1.66 | 165 | 0.54 | 0.57 | 0.00 | 0.57 | 4.429 | 2.0590 |
| 351524 | 0.00 | 170 | 0.88 | −0.04 | −21.75 | 0.63 | 3.858 | 2.0580 |
| 342878 | 0.00 | 153 | 0.87 | 0.15 | −4.55 | −0.37 | 3.829 | 2.0530 |
| 348581 | 0.00 | 166 | 0.97 | 0.07 | −19.31 | −1.11 | 5.457 | 2.0470 |
| 343301 | 1.79 | 169 | 0.34 | 0.52 | −1.33 | 0.73 | 4.478 | 2.0420 |
| 350386 | 1.90 | 169 | 0.48 | −0.44 | −1.45 | −0.47 | 4.363 | 2.0400 |
| 347069 | 1.47 | 170 | 0.74 | 0.65 | 0.94 | 0.94 | 4.789 | 2.0400 |
| 354228 | 1.66 | 157 | 0.67 | 0.31 | 2.68 | 0.58 | 4.388 | 2.0390 |
| 353758 | 1.18 | 165 | 0.73 | −0.40 | 1.89 | −0.74 | 4.678 | 2.0380 |
| 351068 | 1.79 | 170 | 0.09 | 0.04 | 27.00 | −0.74 | 3.924 | 2.0360 |
| 348529 | 2.02 | 157 | 0.48 | −0.57 | 0.53 | −0.56 | 4.341 | 2.0340 |
| 348917 | 1.90 | 170 | 0.21 | 0.31 | −2.84 | 0.83 | 4.614 | 2.0220 |
| 351930 | 1.68 | 162 | 0.30 | 0.69 | −0.93 | 0.94 | 4.574 | 2.0060 |
| 354405 | 1.19 | 170 | 0.76 | 0.61 | 1.26 | 1.02 | 5.281 | 2.0010 |
| 353697 | 1.69 | 169 | 0.45 | 0.33 | 2.11 | 0.26 | 4.200 | 2.0010 |

Locus is the ParAllele identifiers of the polymorphisms, N is the number of genotypes, Scaffold-v2 is the Draft 2 scaffold of the bovine genome sequence, bp is the base pair within the scaffold, IBISS4 is the IBISS4 database identifier, Scaffold-v1 is the draft 1 scaffold of the bovine genome sequence, mean_0 is the mean net feed intake for genotype 0, mean_1 is the mean for genotype 1, and mean_2 is the mean of genotype 2, SD is the standard deviation, a is the additive effect, k is the dominance effect, alpha is the average effect of allele substitutions, tmax is the value of the t test, and log(1/P) is the P value determined from 100,000 permutation tests expressed as a positive integer. A minus value for a means the mean of genotype 0 is lower than the mean of genotype 2, and a minus value for alpha means that selecting for allele 0 will reduce the average values of net feed intake in the population.

TABLE 2
SNP with the high probability of being associated with NFI. The idents are those
in Table 1 and are the ParAllele identifiers. These are located on the BGSP
scaffolds and contigs which indicate the SNP location. These scaffolds and contigs
have been graphically located to maps on the biolives website.

| Ident | BGSP Scaffold | SNP location | Chr. | Contig | Sequence ID | SEQ ID NO: |
|---|---|---|---|---|---|---|
| 345016 | SCAFFOLD291452 | SNP-7280 | Bta2 | Contig126650 | gi51699525 | 1 |
| 349388 | SCAFFOLD261939 | SNP-1026 | Bta1 | Contig290263 | gi21697962 | 2 |
| 346973 | SCAFFOLD71532 | SNP-708 | | contig122162 | gi13397386 | 3 |
| 353336 | SCAFFOLD352562 | SNP-535 | | contig94850 | gi50872235 | 4 |
| 350549 | SCAFFOLD85350 | SNP-16238 | Bta3 | contig324954 | gi13345306 | 5 |
| 347269 | SCAFFOLD165450 | SNP-8470 | Hsa4 | contig222943 | gi19548150 | 6 |
| 350155 | SCAFFOLD240520 | SNP-5556 | Hsa17 | contig32165 | LUC7A | 7 |
| 342650 | IBISS4snp540 | SNP-540 | Hsa1 | | PLA2GA2 | 8 |
| 347570 | SCAFFOLD260891 | SNP-2797 | Hsa9 | contig19628 | | 9 |

TABLE 3
Parallele identifiers for SNP associated with NFI (net feed intake) showing the
sequence scaffold, the Baylor College of Medicine sequence contig containing the SNP, the
Genbank Accession of the DNA sequence, and the alternative bases for each SNP. The exact
location of each SNP is shown in the sequence scaffold, the number after the underscore
is the exact base pair from the start of the scaffold.

| | | | Baylor | | | |
|---|---|---|---|---|---|---|
| Ident | Ibiss4 | Sequence scaffold | Contig | Genbank Accession | SNP bases | SEQ ID NO: |
| 344670 | Null | SCAFFOLD155146_6104 | Contig422955 | AAFC01422942 | A/G | 10 |
| 345385 | Null | SCAFFOLD11677_746 | Contig90789 | AAFC01090787 | C/T | 11 |
| 345533 | Null | SCAFFOLD170036_23917 | Contig433770 | AAFC01433756 | C/T | 12 |
| 348073 | Null | SCAFFOLD110844_5365 | Contig41112 | AAFC01041111 | C/T | 13 |
| 348351 | Null | SCAFFOLD20608_1008 | Contig661138 | AAFC01661110 | C/T | 14 |
| 342844 | Null | SCAFFOLD135269_17123 | Contig131764 | AAFC01131759 | A/G | 15 |
| 342878 | Null | SCAFFOLD155037_16984 | Contig550947 | AAFC01550925 | A/C | 16 |
| 342920 | Null | SCAFFOLD191247_3964 | Contig462712 | AAFC01462697 | C/G | 17 |
| 343301 | Null | SCAFFOLD15017_7532 | Contig168696 | AAFC01168690 | G/T | 18 |
| 343638 | Null | SCAFFOLD466_4857 | Contig366514 | AAFC01366504 | C/G | 19 |
| 343692 | Null | SCAFFOLD71577_11565 | Contig418094 | AAFC01418081 | C/T | 20 |
| 343870 | Null | SCAFFOLD122517_7619 | Contig355194 | AAFC01355184 | C/T | 21 |
| 344238 | Null | SCAFFOLD295006_45304 | Contig19007 | AAFC01019007 | A/G | 22 |
| 344428 | Null | SCAFFOLD86623_4947 | Contig173041 | AAFC01173035 | C/G | 23 |
| 344576 | Null | SCAFFOLD115003_498 | Contig207122 | AAFC01207116 | G/T | 24 |
| 344670 | Null | SCAFFOLD155146_6104 | Contig422955 | AAFC01422942 | A/G | 10 |
| 344822 | Null | SCAFFOLD220929_12275 | Contig726487 | AAFC01726448 | A/G | 25 |
| 345255 | Null | SCAFFOLD91431_3349 | Contig103092 | AAFC01103089 | A/G | 26 |
| 345385 | Null | SCAFFOLD11677_746 | Contig90789 | AAFC01090787 | C/T | 11 |
| 345533 | Null | SCAFFOLD170036_23917 | Contig433770 | AAFC01433756 | C/T | 12 |
| 345597 | Null | SCAFFOLD193911_3423 | Contig10762 | AAFC01010762 | A/G | 27 |
| 346024 | Null | SCAFFOLD49069_4838 | Contig467477 | AAFC01467462 | A/G | 28 |
| 346220 | Null | SCAFFOLD100297_8761 | Contig274152 | AAFC01274143 | G/T | 29 |
| 346800 | Null | SCAFFOLD305898_10192 | Contig158803 | AAFC01158797 | A/G | 30 |
| 346873 | Null | SCAFFOLD38607_6519 | Contig116886 | AAFC01116882 | C/G | 31 |
| 346924 | Null | SCAFFOLD55122_7765 | Contig84561 | AAFC01084560 | A/C | 32 |
| 347029 | Null | SCAFFOLD91431_3586 | Contig103092 | AAFC01103089 | A/C | 33 |
| 347501 | Null | SCAFFOLD245021_7420 | Contig584302 | AAFC01584278 | A/G | 34 |
| 347653 | Null | SCAFFOLD290984_3799 | Contig551036 | AAFC01551014 | C/T | 35 |
| 347727 | Null | SCAFFOLD316858_23449 | Contig113922 | AAFC01113918 | A/G | 36 |
| 348073 | Null | SCAFFOLD110844_5365 | Contig41112 | AAFC01041111 | C/T | 13 |
| 348351 | Null | SCAFFOLD20608_1008 | Contig661138 | AAFC01661110 | C/T | 14 |
| 348465 | Null | SCAFFOLD2481_1870 | Contig499892 | AAFC01499876 | C/T | 37 |
| 348529 | Null | SCAFFOLD268943_3771 | Contig346419 | AAFC01346409 | C/T | 38 |
| 348581 | Null | SCAFFOLD288338_3076 | Contig216746 | AAFC01216740 | C/T | 39 |
| 348678 | Null | SCAFFOLD325650_1207 | Contig637298 | AAFC01637270 | C/T | 40 |
| 348908 | Null | SCAFFOLD10121_13105 | Contig587087 | AAFC01587063 | A/G | 41 |
| 348912 | Null | SCAFFOLD10204_22524 | Contig291510 | AAFC01291500 | A/G | 42 |
| 348917 | Null | SCAFFOLD105096_24896 | Contig256703 | AAFC01256694 | C/T | 43 |
| 349252 | Null | SCAFFOLD216584_13861 | Contig148247 | AAFC01148241 | C/T | 44 |
| 349640 | Null | SCAFFOLD55648_3312 | Contig242188 | AAFC01242181 | C/G | 45 |
| 349908 | Null | SCAFFOLD145774_16171 | Contig83723 | AAFC01083722 | C/T | 46 |
| 350023 | Null | SCAFFOLD190318_15654 | Contig672894 | AAFC01672863 | G/T | 47 |
| 350185 | Null | SCAFFOLD255402_26573 | Contig57357 | AAFC01057356 | C/T | 48 |
| 350386 | Null | SCAFFOLD323674_1755 | Contig684482 | AAFC01684450 | C/T | 49 |
| 350542 | Null | SCAFFOLD85037_17745 | Contig214767 | AAFC01214761 | A/G | 50 |
| 350815 | Null | SCAFFOLD185691_4123 | Contig367991 | AAFC01367981 | A/G | 51 |
| 350934 | Null | SCAFFOLD245150_4016 | Contig79901 | AAFC01079900 | C/T | 52 |
| 351039 | Null | SCAFFOLD285539_13746 | Contig210695 | AAFC01210689 | A/C | 53 |
| 351068 | Null | SCAFFOLD295225_17655 | Contig499260 | AAFC01499244 | C/T | 54 |
| 351082 | Null | SCAFFOLD301148_20414 | Contig399476 | AAFC01399463 | C/T | 55 |
| 351114 | Null | SCAFFOLD317129_13923 | Contig469925 | AAFC01469910 | A/G | 56 |
| 351119 | Null | SCAFFOLD317870_2261 | Contig324071 | AAFC01324061 | C/T | 57 |
| 351157 | Null | SCAFFOLD40038_18553 | Contig442241 | AAFC01442227 | A/T | 58 |
| 351382 | Null | SCAFFOLD115666_13006 | Contig582501 | AAFC01582477 | G/T | 59 |
| 351385 | Null | SCAFFOLD116234_3345 | Contig387450 | AAFC01387438 | C/T | 60 |
| 351524 | Null | SCAFFOLD200011_13411 | Contig569617 | AAFC01569595 | C/T | 61 |
| 351837 | Null | SCAFFOLD48045_564 | Contig135363 | AAFC01135358 | G/T | 62 |
| 351885 | Null | SCAFFOLD6887_2230 | Contig543315 | AAFC01543294 | A/G | 63 |
| 351930 | Null | SCAFFOLD95294_4333 | Contig237582 | AAFC01237575 | A/T | 64 |
| 352079 | Null | SCAFFOLD15666_3538 | Contig545827 | AAFC01545806 | A/G | 65 |
| 352237 | Null | SCAFFOLD250157_11623 | Contig11356 | AAFC01011356 | G/T | 66 |
| 352302 | Null | SCAFFOLD284472_542 | Contig682466 | AAFC01682434 | A/G | 67 |
| 352371 | Null | SCAFFOLD321814_14337 | Contig62446 | AAFC01062445 | C/T | 68 |
| 352540 | Null | SCAFFOLD113475_827 | Contig460868 | AAFC01460853 | A/C | 69 |
| 352721 | Null | SCAFFOLD216584_13710 | Contig148247 | AAFC01148241 | C/T | 70 |
| 352772 | Null | SCAFFOLD25159_19124 | Contig292978 | AAFC01292968 | C/T | 71 |
| 353131 | Null | SCAFFOLD171003_4691 | Contig46420 | AAFC01046419 | A/G | 72 |
| 353697 | Null | SCAFFOLD75727_10176 | Contig497215 | AAFC01497199 | A/G | 73 |
| 353758 | Null | SCAFFOLD130522_9733 | Contig194779 | AAFC01194773 | C/T | 74 |
| 354067 | Null | SCAFFOLD321782_15219 | Contig17844 | AAFC01017844 | C/T | 75 |
| 354212 | Null | SCAFFOLD55122_7983 | Contig84561 | AAFC01084560 | A/C | 76 |
| 354228 | Null | SCAFFOLD75727_10291 | Contig497215 | AAFC01497199 | A/G | 77 |
| 354405 | Null | SCAFFOLD90324_3708 | Contig60222 | AAFC01060221 | C/T | 78 |
| 354433 | Null | SCAFFOLD205065_7657 | Contig650761 | AAFC01650733 | A/T | 79 |

### EXAMPLE 3

[0088] To find additional loci affecting net feed intake, further analyses of the whole genome scan were performed. First, the NFI trait values for all measured individuals, not just the 189 in the whole genome scan, were adjusted by contemporary group (herd_cohort_sex_market) and by sireid as a random factor using ASREML. The residual net feed intake phenotypes were then available for further analysis. The means and standard errors of the residual NFI for each genotype in the whole genome scan were calculated and at test computed for each comparison. The statistical significance of the largest mean difference was calculated using 100,000 permutations.

[0089] The results of this analysis indicates a further 157 loci of interest (P<0.01) and a further 9 loci with P<0.001 (Table 5).

[0090] These loci, as well as some annotation of the 13 top loci, are contained in Table 4. The additional loci show promise as candidate genes for net feed intake. Of these, DNM1L is known to be involved in the size and shape of mitochondria, the powerhouse of the cell, BAAT is known to be involved in differences in the uptake of lipids in the intestine, DMD is known to be involved in muscle growth and hypertrophy, ZNF33A is involved in increased entry into the S or synthesis phase in the cell cycle in which is genome is doubled, and ATP1A1 is known to be involved in the maintenance of the Na+/K+ ion gradient, a process requiring a great deal of the resting metabolic energy. Other speculative candidates are GBAS, which is possibly involved in synaptic vesicle and membrane docking, and maintenance of synaptic vesicle gradients requires a great deal of the resting metabolic energy, and SEC5L1 which is involved in the exocyst complex and also appears to be involved in the neuronal membrane trafficking.

[0091] The method of determining whether a measured allele or genotype has an increased value compared to others at that locus or more broadly within the gene or genetic region would be familiar to the person skilled in the art but will be described briefly. In essence we partition the variance associated with the trait into that due to the Mendelian component associated with the locus under discussion as well as a polygenic component due to shared family. Before this is done, the trait values must be adjusted for fixed environmental and genetic effects, for covariates, and for random genetic effects such as the sire or dam. This is usually performed using a General Linear Mixed Model. Then the genotypes can be compared using at test or a one-way analysis of variance, and the statistical significance can be assessed using permutation tests, particularly where the trait distribution is non-normal. The average effect of allele substitution at the locus is derived from the allele frequency, the difference between homozygotes and the degree of dominance, where alpha=a[1+k(p−(1−p)] where a is half the difference between homozygotes, p is the allele frequency and k is d/a where d is the difference between the heterozygote and half the distance between the homozygotes. Good starting points for this process are Boerwinkle et al. 1986 Ann. Hum. Genet. 50, 181-194 and Lynch and Walsh, 1997 (Sinauer Associates), the contents of which are incorporated herein by reference. The association of an allele or genotype with increased value will often apply across breeds and families within breeds. However, a particular allele or genotype may not always be associated with increased value across breeds, in one breed the allele or genotype might be associated with increased value but in another breed it might be associated with decreased value or not be associated with differences in value. The results presented here are the associations aggregated across the breeds, which represents the alleles or genotypes that will be associated with increased value for most breeds. Since the values have been adjusted for the breeds, the associations can be pooled across breeds, and differences in allele frequency in the breeds will not cause the generation of spurious associations due to Simpsons Paradox.

[0092] The person skilled in the art will know that some breeds may have different associations between the allele or genotype and the trait due to one of several real biological causes. The first and probably most common is that the measured allele or genotype is not causative, so it is in linkage disequilibrium with the causative allele or genotype. There will be cases where the allele or genotype being measured is in opposite genetic phase to the causative allele or genotype, and this might be reflected in some breed differences. The second is that there may be more than one causative mutation in the gene, with different frequencies in different breeds, hence the measured allele or genotype may show different predictive efficiencies in different breeds and show opposite genetic phase relationships due to complex associations between the measured allele or genotype and the different causative mutations. The third is that a causative mutation in a gene may be affected by genes elsewhere in the genome. These epistatic or background effects have been known for decades, and some of these may have an impact upon the association between the measured allele or genotype and the trait value.

TABLE 4
Loci with high levels of support associated with adjusted net feed intake.

| | | | | | | SEQ |
|---|---|---|---|---|---|---|
| | scaffold- | | | | | ID |
| snp_id | v2 | bp | PermP | Hsa | Gene | NO: |
| 354186 | Un.449 | 364840 | 0.0001 | X | DMD, Duchenne Muscular Dystrophy | 80 |
| 350075 | Un.7108 | 39426 | 0.0002 | 5 | no gene near | 81 |
| 345371 | Un.2454 | 65434 | 0.0003 | 3 | EMR2, EGF-like, mucin-like, hormone receptor like 2 | 82 |
| 349676 | Un.2314 | 29810 | 0.0004 | 3 | no gene near | 83 |
| 350777 | 28.18 | 1679163 | 0.0006 | 1 | ZNF33A, zinc finger protein 33A | 84 |
| 344359 | 5.117 | 1267082 | 0.0007 | 12 | DNM1L, dynamin 1-like | 85 |
| 345126 | 15.107 | 9296 | 0.0008 | 11 | near C11orf8 | 86 |
| 347062 | 25.53 | 689761 | 0.0008 | 7 | GBAS glioblastoma amplified sequence | 87 |
| 348806 | Un.204 | 76583 | 0.0011 | 6 | SEC5L1 SEC5-like 1 (S. cerevisiae) | 88 |
| 343136 | 3.6 | 42829 | 0.0012 | 1 | ATP1A1, ATPase, Na+/K+ transporting, alpha 1 | 89 |
| | | | | | polypeptide | |
| 348798 | Un.2314 | 29908 | 0.0012 | 3 | no gene near | 90 |
| 349583 | 4.96 | 282594 | 0.0012 | 7 | no gene near | 91 |
| 344029 | 14.72 | 324549 | 0.0031 | 8 | BAAT bile acid coenzyme A amino acid N- | 92 |
| | | | | | acyltransferase | |

Snp_id is the ParAllele SNP identifier,
scaffold-v2 is the version 2 scaffold,
bp is the location of the SNP in the scaffold,
PermP is the P value associated with the association,
Hsa is the human chromosome associated with the SNP and Gene is the closest gene to the SNP.

TABLE 5
Associations between DNA markers and net feed intake sorted in decreasing order of
statistical significance.

| Locus | mean_0 | SE | mean_1 | SE | mean_2 | SE | N | Freq | a | k | alpha | tmax | PermP |
|---|---|---|---|---|---|---|---|---|---|---|---|---|---|
| 353336 | 1.37 | 0.33 | 0.03 | 0.20 | −0.04 | 0.12 | 171 | 0.20 | 0.70 | −0.91 | 1.08 | 3.87 | 0.0000 |
| 354433 | 0.17 | 0.32 | −1.41 | 0.32 | 0.19 | 0.11 | 161 | 0.07 | −0.01 | 146.52 | 1.37 | 3.63 | 0.0000 |
| 354186 | −0.13 | 0.11 | NaN | NaN | 0.67 | 0.20 | 165 | 0.75 | −0.40 | NaN | NaN | 3.50 | 0.0001 |
| 343692 | 0.00 | 0.15 | 0.48 | 0.17 | −0.51 | 0.17 | 170 | 0.62 | 0.26 | 2.83 | 0.43 | 3.60 | 0.0001 |
| 347269 | −1.33 | 0.34 | 0.28 | 0.17 | 0.11 | 0.12 | 171 | 0.19 | −0.72 | −1.23 | −1.27 | 3.64 | 0.0002 |
| 350075 | −0.26 | 0.16 | 0.47 | 0.15 | 0.08 | 0.21 | 167 | 0.54 | −0.17 | −3.33 | −0.13 | 3.31 | 0.0002 |
| 347570 | 0.76 | 0.24 | 0.09 | 0.15 | −0.24 | 0.15 | 170 | 0.40 | 0.50 | −0.34 | 0.54 | 3.68 | 0.0002 |
| 343617 | −0.05 | 0.14 | −0.06 | 0.19 | 1.09 | 0.28 | 150 | 0.72 | −0.57 | 1.02 | −0.83 | 3.42 | 0.0003 |
| 345371 | 1.28 | 0.33 | −0.20 | 0.23 | 0.06 | 0.11 | 171 | 0.14 | 0.61 | −1.42 | 1.25 | 3.52 | 0.0003 |
| 349676 | 0.63 | 0.22 | −0.25 | 0.14 | 0.21 | 0.17 | 170 | 0.44 | 0.21 | −3.14 | 0.30 | 3.41 | 0.0004 |
| 350777 | −0.03 | 0.11 | 0.53 | 0.22 | 1.87 | 0.60 | 168 | 0.90 | −0.95 | 0.41 | −1.26 | 3.21 | 0.0006 |
| 347727 | −0.23 | 0.13 | 0.51 | 0.18 | 0.11 | 0.27 | 168 | 0.66 | −0.17 | −3.41 | 0.02 | 3.48 | 0.0007 |
| 344359 | −0.38 | 0.19 | 0.16 | 0.18 | 0.34 | 0.14 | 171 | 0.44 | −0.36 | −0.51 | −0.38 | 3.04 | 0.0007 |
| 345126 | 1.35 | 0.61 | −0.83 | 0.35 | 0.17 | 0.10 | 169 | 0.06 | 0.59 | −2.71 | 1.98 | 3.05 | 0.0008 |
| 347062 | 0.67 | 0.24 | 0.08 | 0.14 | −0.26 | 0.16 | 169 | 0.44 | 0.46 | −0.26 | 0.48 | 3.33 | 0.0008 |
| 351930 | 0.83 | 0.31 | −0.14 | 0.16 | 0.03 | 0.14 | 163 | 0.30 | 0.40 | −1.43 | 0.62 | 2.96 | 0.0009 |
| 350155 | 0.37 | 0.16 | −0.30 | 0.14 | 0.56 | 0.25 | 170 | 0.61 | −0.09 | 8.16 | −0.26 | 3.20 | 0.0010 |
| 348806 | 0.08 | 0.10 | 2.37 | 0.74 | NaN | NaN | 161 | 0.99 | NaN | NaN | NaN | 3.10 | 0.0011 |
| 350549 | 0.76 | 0.24 | 0.15 | 0.15 | −0.35 | 0.22 | 137 | 0.44 | 0.55 | −0.10 | 0.56 | 3.23 | 0.0011 |
| 348798 | 0.21 | 0.17 | −0.28 | 0.15 | 0.62 | 0.23 | 168 | 0.57 | −0.21 | 3.33 | −0.30 | 3.43 | 0.0012 |
| 349583 | 1.61 | 0.54 | −0.31 | 0.21 | 0.10 | 0.11 | 169 | 0.09 | 0.76 | −1.53 | 1.72 | 3.88 | 0.0012 |
| 343136 | −0.22 | 0.14 | 0.21 | 0.16 | 0.75 | 0.24 | 170 | 0.66 | −0.48 | 0.11 | −0.50 | 3.50 | 0.0012 |
| 343870 | −0.41 | 0.18 | 0.35 | 0.19 | 0.24 | 0.16 | 160 | 0.45 | −0.33 | −1.33 | −0.37 | 2.93 | 0.0013 |
| 344786 | 0.03 | 0.16 | 0.72 | 0.24 | −0.18 | 0.16 | 157 | 0.54 | 0.11 | 7.41 | 0.16 | 3.17 | 0.0013 |
| 347283 | −0.76 | 0.23 | 0.29 | 0.20 | 0.15 | 0.13 | 167 | 0.25 | −0.46 | −1.30 | −0.76 | 3.04 | 0.0014 |
| 353387 | 0.21 | 0.11 | −0.67 | 0.29 | −0.36 | 0.50 | 166 | 0.89 | 0.28 | −2.08 | −0.17 | 2.87 | 0.0014 |
| 351702 | 0.69 | 0.21 | NaN | NaN | −0.11 | 0.11 | 170 | 0.24 | 0.40 | NaN | NaN | 3.53 | 0.0014 |
| 346024 | 0.07 | 0.13 | 0.53 | 0.18 | −0.44 | 0.25 | 171 | 0.72 | 0.26 | 2.76 | 0.57 | 3.22 | 0.0015 |
| 345292 | 0.20 | 0.20 | −0.21 | 0.13 | 0.50 | 0.20 | 168 | 0.53 | −0.15 | 3.65 | −0.19 | 3.06 | 0.0016 |
| 351344 | 1.11 | 0.37 | −0.26 | 0.17 | 0.18 | 0.13 | 170 | 0.23 | 0.46 | −1.95 | 0.95 | 3.26 | 0.0017 |
| 342844 | 0.09 | 0.11 | 0.73 | 0.25 | −0.56 | 0.28 | 165 | 0.88 | 0.33 | 2.96 | 1.07 | 3.49 | 0.0018 |
| 346973 | −0.36 | 0.22 | 0.64 | 0.20 | 0.04 | 0.14 | 163 | 0.30 | −0.20 | −3.97 | −0.52 | 3.32 | 0.0018 |
| 350444 | 0.12 | 0.14 | −0.51 | 0.24 | 0.36 | 0.18 | 166 | 0.66 | −0.12 | 6.37 | −0.35 | 2.93 | 0.0018 |
| 346987 | −0.11 | 0.55 | 0.62 | 0.15 | −0.11 | 0.13 | 167 | 0.16 | −0.00 | −1228.83 | −0.50 | 3.24 | 0.0019 |
| 346634 | −0.17 | 0.14 | 0.13 | 0.16 | 0.67 | 0.24 | 168 | 0.62 | −0.42 | 0.30 | −0.45 | 3.06 | 0.0019 |
| 348902 | 1.42 | 0.53 | −0.29 | 0.22 | 0.12 | 0.11 | 171 | 0.18 | 0.65 | −1.63 | 1.34 | 3.16 | 0.0019 |
| 349297 | −0.25 | 0.18 | 0.15 | 0.15 | 0.62 | 0.18 | 168 | 0.60 | −0.43 | 0.08 | −0.44 | 3.16 | 0.0019 |
| 347122 | −0.29 | 0.14 | 0.29 | 0.16 | 0.49 | 0.23 | 168 | 0.60 | −0.39 | −0.50 | −0.35 | 3.05 | 0.0020 |
| 349908 | 0.09 | 0.24 | 0.35 | 0.15 | −0.28 | 0.15 | 170 | 0.46 | 0.18 | 2.43 | 0.14 | 2.95 | 0.0021 |
| 349965 | −0.74 | 0.25 | 0.31 | 0.18 | 0.13 | 0.14 | 162 | 0.28 | −0.44 | −1.41 | −0.71 | 3.30 | 0.0022 |
| 345591 | 1.18 | 0.55 | 0.09 | 0.22 | −0.00 | 0.11 | 170 | 0.19 | 0.59 | −0.85 | 0.90 | 2.95 | 0.0025 |
| 350995 | 0.12 | 0.11 | −1.61 | 0.19 | 0.04 | 0.58 | 143 | 0.96 | 0.04 | −42.41 | −1.52 | 3.33 | 0.0026 |
| 347733 | −0.12 | 0.14 | 0.06 | 0.16 | 0.73 | 0.29 | 170 | 0.66 | −0.42 | 0.59 | −0.50 | 2.94 | 0.0026 |
| 345261 | 0.04 | 0.11 | 0.46 | 0.23 | −1.79 | 0.55 | 170 | 0.89 | 0.91 | 1.47 | 1.96 | 2.93 | 0.0027 |
| 348912 | 0.01 | 0.11 | 0.80 | 0.24 | −0.65 | 0.48 | 169 | 0.86 | 0.33 | 3.37 | 1.12 | 2.98 | 0.0027 |
| 346106 | −0.07 | 0.12 | 0.23 | 0.20 | 1.02 | 0.41 | 170 | 0.80 | −0.55 | 0.44 | −0.69 | 2.69 | 0.0030 |
| 343500 | 0.07 | 0.10 | −0.11 | 0.31 | 1.45 | 0.56 | 169 | 0.88 | −0.69 | 1.26 | −1.36 | 2.92 | 0.0030 |
| 343193 | −0.42 | 0.23 | 0.03 | 0.16 | 0.41 | 0.15 | 169 | 0.40 | −0.41 | −0.09 | −0.42 | 3.04 | 0.0030 |
| 344029 | −0.54 | 0.28 | 0.39 | 0.18 | 0.06 | 0.13 | 170 | 0.30 | −0.30 | −2.14 | −0.56 | 2.83 | 0.0031 |
| 353932 | 0.83 | 0.33 | 0.33 | 0.17 | −0.17 | 0.13 | 171 | 0.26 | 0.50 | 0.00 | 0.50 | 2.95 | 0.0032 |
| 346573 | −0.10 | 0.20 | 0.45 | 0.18 | −0.17 | 0.14 | 170 | 0.35 | 0.03 | 17.90 | −0.14 | 2.79 | 0.0032 |
| 353748 | 0.11 | 0.14 | −0.26 | 0.18 | 0.51 | 0.20 | 171 | 0.62 | −0.20 | 2.83 | −0.34 | 2.80 | 0.0032 |
| 345696 | −0.19 | 0.15 | 0.45 | 0.19 | 0.17 | 0.20 | 160 | 0.63 | −0.18 | −2.62 | −0.06 | 2.71 | 0.0033 |
| 352784 | −0.86 | 0.35 | 0.31 | 0.19 | 0.12 | 0.12 | 169 | 0.18 | −0.49 | −1.38 | −0.92 | 3.05 | 0.0035 |
| 345464 | 0.03 | 0.10 | 1.09 | 0.38 | −0.88 | 0.15 | 170 | 0.95 | 0.45 | 3.35 | 1.81 | 2.75 | 0.0035 |
| 344027 | 0.84 | 0.49 | −0.61 | 0.21 | 0.20 | 0.11 | 170 | 0.14 | 0.32 | −3.53 | 1.14 | 3.15 | 0.0035 |
| 346642 | 0.55 | 0.23 | −0.21 | 0.14 | 0.13 | 0.16 | 168 | 0.43 | 0.21 | −2.65 | 0.29 | 2.97 | 0.0037 |
| 343918 | 0.26 | 0.24 | 0.35 | 0.14 | −0.30 | 0.16 | 171 | 0.44 | 0.28 | 1.32 | 0.23 | 3.04 | 0.0039 |
| 346964 | 0.10 | 0.15 | −0.14 | 0.14 | 0.73 | 0.28 | 171 | 0.62 | −0.31 | 1.76 | −0.45 | 2.95 | 0.0039 |
| 352451 | −0.49 | 0.20 | 0.24 | 0.15 | 0.21 | 0.16 | 170 | 0.44 | −0.35 | −1.08 | −0.39 | 2.73 | 0.0040 |
| 347425 | −0.28 | 0.19 | 0.38 | 0.16 | 0.16 | 0.17 | 170 | 0.50 | −0.22 | −2.02 | −0.22 | 2.72 | 0.0040 |
| 342614 | 0.01 | 0.10 | 1.00 | 0.31 | −0.02 | 0.96 | 171 | 0.95 | 0.01 | 68.20 | 0.92 | 2.77 | 0.0040 |
| 344675 | 0.12 | 0.14 | 0.25 | 0.17 | −0.88 | 0.32 | 166 | 0.76 | 0.50 | 1.26 | 0.83 | 3.03 | 0.0041 |
| 345016 | −0.16 | 0.17 | −0.00 | 0.15 | 0.64 | 0.20 | 170 | 0.57 | −0.40 | 0.61 | −0.43 | 3.04 | 0.0042 |
| 346191 | 0.29 | 0.32 | −0.16 | 0.14 | 0.48 | 0.18 | 151 | 0.37 | −0.10 | 5.45 | 0.04 | 2.89 | 0.0042 |
| 344550 | 0.10 | 0.10 | 1.61 | 0.55 | −0.21 | 2.48 | 158 | 0.97 | 0.15 | 10.97 | 1.72 | 2.66 | 0.0042 |
| 344923 | 0.52 | 0.22 | −0.22 | 0.15 | 0.13 | 0.16 | 170 | 0.43 | 0.19 | −2.81 | 0.27 | 2.88 | 0.0043 |
| 353129 | 0.15 | 0.13 | 0.24 | 0.19 | −0.81 | 0.24 | 169 | 0.75 | 0.48 | 1.18 | 0.77 | 3.00 | 0.0043 |
| 350612 | −0.61 | 0.28 | 0.28 | 0.16 | 0.10 | 0.14 | 171 | 0.31 | −0.36 | −1.49 | −0.56 | 2.76 | 0.0044 |
| 348684 | −0.84 | 0.37 | 0.10 | 0.17 | 0.21 | 0.13 | 169 | 0.25 | −0.53 | −0.78 | −0.74 | 2.75 | 0.0045 |
| 349112 | 0.13 | 0.10 | 0.43 | 0.52 | −1.75 | 0.52 | 159 | 0.95 | 0.94 | 1.32 | 2.05 | 2.95 | 0.0045 |
| 342958 | −0.41 | 0.19 | 0.27 | 0.15 | 0.28 | 0.21 | 161 | 0.52 | −0.34 | −0.99 | −0.33 | 2.81 | 0.0045 |
| 344238 | −0.04 | 0.13 | 0.06 | 0.17 | 0.84 | 0.30 | 170 | 0.71 | −0.44 | 0.77 | −0.58 | 2.79 | 0.0046 |
| 346975 | −0.04 | 0.71 | 0.68 | 0.23 | −0.05 | 0.11 | 171 | 0.13 | 0.01 | 107.69 | −0.53 | 2.91 | 0.0046 |
| 347075 | 0.53 | 0.19 | −0.17 | 0.14 | 0.16 | 0.20 | 171 | 0.46 | 0.18 | −2.77 | 0.22 | 2.97 | 0.0048 |
| 345781 | −0.01 | 0.13 | 0.04 | 0.17 | 0.95 | 0.37 | 171 | 0.72 | −0.48 | 0.88 | −0.67 | 2.71 | 0.0048 |
| 350926 | −0.35 | 0.20 | 0.37 | 0.14 | −0.02 | 0.18 | 168 | 0.46 | −0.16 | −3.43 | −0.21 | 2.88 | 0.0049 |
| 349265 | −0.26 | 0.17 | 0.34 | 0.13 | −0.05 | 0.26 | 170 | 0.56 | −0.11 | −4.71 | −0.05 | 2.81 | 0.0049 |
| 351382 | 0.08 | 0.12 | 0.40 | 0.21 | −0.98 | 0.31 | 162 | 0.80 | 0.53 | 1.60 | 1.05 | 2.84 | 0.0050 |
| 348351 | −0.89 | 0.24 | 0.37 | 0.21 | 0.08 | 0.12 | 171 | 0.21 | −0.49 | −1.59 | −0.93 | 3.08 | 0.0050 |
| 343949 | 0.11 | 0.11 | 0.24 | 0.28 | −1.92 | 0.38 | 170 | 0.93 | 1.02 | 1.12 | 2.00 | 3.02 | 0.0050 |
| 353131 | 0.40 | 0.17 | 0.04 | 0.16 | −0.31 | 0.18 | 169 | 0.57 | 0.36 | −0.01 | 0.36 | 2.77 | 0.0052 |
| 345458 | 0.06 | 0.28 | −0.24 | 0.14 | 0.36 | 0.16 | 161 | 0.32 | −0.15 | 3.01 | 0.01 | 2.71 | 0.0054 |
| 345255 | 0.38 | 0.20 | 0.06 | 0.13 | −0.39 | 0.22 | 166 | 0.54 | 0.39 | 0.15 | 0.39 | 2.51 | 0.0056 |
| 345916 | 0.27 | 0.12 | −0.44 | 0.20 | −0.12 | 0.38 | 168 | 0.83 | 0.20 | −2.66 | −0.15 | 2.82 | 0.0056 |
| 346166 | 0.16 | 0.20 | −0.19 | 0.14 | 0.49 | 0.20 | 167 | 0.54 | −0.17 | 3.07 | −0.21 | 2.80 | 0.0056 |
| 346330 | −0.34 | 0.16 | 0.30 | 0.19 | 0.36 | 0.17 | 162 | 0.52 | −0.35 | −0.81 | −0.34 | 3.00 | 0.0057 |
| 353072 | 0.07 | 0.11 | 0.64 | 0.27 | −1.12 | 0.57 | 167 | 0.92 | 0.59 | 1.96 | 1.56 | 3.01 | 0.0057 |
| 350500 | 0.08 | 0.12 | −0.06 | 0.18 | 1.26 | 0.41 | 170 | 0.77 | −0.59 | 1.24 | −0.98 | 2.78 | 0.0058 |
| 344038 | −0.98 | 0.41 | 0.36 | 0.40 | 0.12 | 0.11 | 165 | 0.11 | −0.55 | −1.43 | −1.16 | 2.77 | 0.0059 |
| 351664 | −0.06 | 0.11 | 0.64 | 0.22 | −0.22 | 0.36 | 171 | 0.85 | 0.08 | 9.86 | 0.64 | 2.97 | 0.0060 |
| 349617 | 0.28 | 0.12 | −0.38 | 0.19 | 0.16 | 0.32 | 170 | 0.78 | 0.06 | −10.76 | −0.28 | 2.90 | 0.0060 |
| 353087 | 0.19 | 0.91 | 0.86 | 0.26 | −0.02 | 0.11 | 169 | 0.07 | 0.10 | 7.42 | −0.57 | 2.71 | 0.0061 |
| 351855 | 0.38 | 0.15 | 0.09 | 0.19 | −0.23 | 0.17 | 170 | 0.50 | 0.30 | 0.04 | 0.30 | 2.60 | 0.0061 |
| 346539 | 0.87 | 0.24 | 0.18 | 0.19 | −0.08 | 0.13 | 169 | 0.25 | 0.47 | −0.47 | 0.58 | 2.83 | 0.0061 |
| 350312 | 0.10 | 0.19 | −0.17 | 0.15 | 0.51 | 0.18 | 170 | 0.55 | −0.21 | 2.28 | −0.25 | 2.85 | 0.0064 |
| 352162 | −0.22 | 0.15 | 0.43 | 0.17 | −0.07 | 0.19 | 170 | 0.56 | −0.07 | −7.91 | −0.00 | 2.83 | 0.0066 |
| 345166 | 0.25 | 0.12 | 0.02 | 0.20 | −0.58 | 0.29 | 171 | 0.73 | 0.42 | 0.44 | 0.50 | 2.78 | 0.0067 |
| 347646 | 0.02 | 0.12 | −0.01 | 0.22 | 1.08 | 0.37 | 167 | 0.80 | −0.53 | 1.06 | −0.87 | 2.78 | 0.0067 |
| 354124 | NaN | NaN | 1.69 | 0.40 | 0.03 | 0.10 | 170 | 0.01 | NaN | NaN | NaN | 2.84 | 0.0067 |
| 348221 | −0.33 | 0.15 | 0.33 | 0.15 | 0.12 | 0.20 | 171 | 0.47 | −0.23 | −1.90 | −0.25 | 2.89 | 0.0069 |
| 345428 | −0.14 | 0.14 | 0.16 | 0.15 | 0.73 | 0.31 | 166 | 0.67 | −0.44 | 0.33 | −0.49 | 2.73 | 0.0069 |
| 346083 | −0.10 | 0.12 | 0.45 | 0.17 | 0.10 | 0.48 | 170 | 0.76 | −0.10 | −4.74 | 0.14 | 2.59 | 0.0069 |
| 350535 | −0.04 | 0.34 | 0.70 | 0.22 | −0.02 | 0.12 | 170 | 0.14 | −0.01 | −60.99 | −0.54 | 2.48 | 0.0070 |
| 346860 | 0.27 | 0.12 | −0.31 | 0.19 | −0.19 | 0.33 | 171 | 0.80 | 0.23 | −1.53 | 0.02 | 2.54 | 0.0070 |
| 348791 | −0.08 | 0.17 | −0.10 | 0.14 | 0.59 | 0.22 | 170 | 0.52 | −0.34 | 1.03 | −0.35 | 2.77 | 0.0072 |
| 353906 | 0.04 | 0.30 | 0.42 | 0.15 | −0.20 | 0.14 | 170 | 0.35 | 0.12 | 4.16 | −0.03 | 2.98 | 0.0074 |
| 352079 | 0.14 | 0.16 | 0.47 | 0.23 | −0.23 | 0.16 | 160 | 0.56 | 0.18 | 2.80 | 0.24 | 2.57 | 0.0074 |
| 349343 | 1.97 | 0.65 | 0.20 | 0.20 | 0.03 | 0.12 | 168 | 0.14 | 0.97 | −0.83 | 1.56 | 2.56 | 0.0075 |
| 348449 | −0.04 | 0.18 | 0.39 | 0.15 | −0.35 | 0.20 | 168 | 0.55 | 0.15 | 3.80 | 0.21 | 2.91 | 0.0075 |
| 346924 | 0.29 | 0.14 | 0.03 | 0.17 | −0.54 | 0.25 | 168 | 0.68 | 0.41 | 0.37 | 0.47 | 2.63 | 0.0076 |
| 349798 | 0.03 | 0.14 | 0.36 | 0.16 | −0.54 | 0.27 | 170 | 0.76 | 0.28 | 2.15 | 0.61 | 2.68 | 0.0076 |
| 346663 | 0.09 | 0.11 | 0.46 | 0.25 | −1.13 | 0.22 | 170 | 0.93 | 0.61 | 1.62 | 1.45 | 3.05 | 0.0076 |
| 352113 | 0.09 | 0.11 | 0.40 | 0.24 | −1.13 | 0.22 | 171 | 0.93 | 0.61 | 1.52 | 1.39 | 2.93 | 0.0077 |
| 351627 | −0.91 | 0.34 | 0.39 | 0.21 | 0.05 | 0.12 | 168 | 0.17 | −0.48 | −1.72 | −1.02 | 2.78 | 0.0077 |
| 353576 | 1.03 | 0.45 | −0.05 | 0.17 | 0.07 | 0.12 | 165 | 0.19 | 0.48 | −1.26 | 0.86 | 2.62 | 0.0078 |
| 348728 | 0.15 | 0.18 | −0.26 | 0.17 | 0.40 | 0.18 | 158 | 0.54 | −0.13 | 4.20 | −0.17 | 2.60 | 0.0079 |
| 348913 | 0.27 | 0.14 | 0.23 | 0.18 | −0.38 | 0.22 | 169 | 0.59 | 0.33 | 0.87 | 0.38 | 2.65 | 0.0079 |
| 349578 | −0.39 | 0.31 | 0.57 | 0.19 | −0.03 | 0.12 | 169 | 0.25 | −0.18 | −4.39 | −0.57 | 2.70 | 0.0080 |
| 347472 | 0.42 | 0.18 | −0.12 | 0.15 | 0.08 | 0.20 | 170 | 0.51 | 0.17 | −2.21 | 0.17 | 2.31 | 0.0082 |
| 349376 | −1.13 | 0.22 | 0.40 | 0.24 | 0.09 | 0.11 | 171 | 0.07 | −0.61 | −1.52 | −1.39 | 2.93 | 0.0082 |
| 350721 | 0.29 | 0.13 | −0.26 | 0.17 | 0.18 | 0.33 | 171 | 0.71 | 0.06 | −8.62 | −0.15 | 2.60 | 0.0082 |
| 347029 | 0.41 | 0.19 | 0.04 | 0.14 | −0.36 | 0.22 | 164 | 0.55 | 0.38 | 0.03 | 0.38 | 2.60 | 0.0083 |
| 346682 | 0.04 | 0.13 | 0.29 | 0.16 | −1.13 | 0.25 | 171 | 0.80 | 0.58 | 1.44 | 1.10 | 2.53 | 0.0084 |
| 348436 | 0.02 | 0.11 | 0.57 | 0.26 | −1.58 | 0.56 | 170 | 0.89 | 0.80 | 1.69 | 1.86 | 2.52 | 0.0084 |
| 354212 | 0.29 | 0.14 | 0.04 | 0.16 | −0.54 | 0.25 | 171 | 0.68 | 0.41 | 0.40 | 0.47 | 2.63 | 0.0084 |
| 349604 | 0.32 | 0.15 | 0.14 | 0.18 | −0.33 | 0.17 | 169 | 0.58 | 0.33 | 0.46 | 0.35 | 2.73 | 0.0085 |
| 344696 | 0.23 | 0.46 | −0.31 | 0.17 | 0.26 | 0.13 | 170 | 0.20 | −0.02 | 33.79 | 0.31 | 2.60 | 0.0085 |
| 347934 | 0.28 | 0.13 | 0.03 | 0.17 | −0.47 | 0.30 | 168 | 0.68 | 0.37 | 0.33 | 0.42 | 2.46 | 0.0086 |
| 354173 | 0.03 | 0.15 | −0.24 | 0.21 | 0.41 | 0.17 | 167 | 0.48 | −0.19 | 2.39 | −0.17 | 2.41 | 0.0086 |
| 353490 | 0.58 | 0.22 | −0.06 | 0.16 | −0.01 | 0.17 | 155 | 0.45 | 0.30 | −1.15 | 0.33 | 2.31 | 0.0086 |
| 351064 | 1.07 | 0.39 | 1.17 | 0.54 | −0.03 | 0.11 | 139 | 0.06 | 0.55 | 1.19 | −0.02 | 2.56 | 0.0087 |
| 345918 | −0.12 | 0.24 | −0.18 | 0.16 | 0.38 | 0.14 | 163 | 0.35 | −0.25 | 1.23 | −0.16 | 2.57 | 0.0088 |
| 346960 | 0.53 | 0.19 | 0.04 | 0.17 | −0.12 | 0.16 | 169 | 0.42 | 0.32 | −0.51 | 0.35 | 2.52 | 0.0088 |
| 345383 | 0.13 | 0.12 | 0.26 | 0.20 | −0.82 | 0.24 | 169 | 0.81 | 0.48 | 1.27 | 0.85 | 2.94 | 0.0088 |
| 342761 | 0.41 | 0.21 | −0.28 | 0.17 | 0.20 | 0.15 | 170 | 0.31 | 0.10 | −5.81 | 0.32 | 2.46 | 0.0088 |
| 346264 | −0.27 | 0.19 | 0.05 | 0.16 | 0.34 | 0.17 | 169 | 0.46 | −0.31 | −0.03 | −0.31 | 2.42 | 0.0090 |
| 345385 | 0.01 | 0.16 | 0.47 | 0.19 | −0.24 | 0.14 | 169 | 0.61 | 0.12 | 4.82 | 0.25 | 2.74 | 0.0090 |
| 342912 | −0.46 | 0.96 | 0.98 | 0.54 | −0.04 | 0.11 | 145 | 0.07 | −0.21 | −5.80 | −1.26 | 2.50 | 0.0091 |
| 352161 | 0.17 | 0.10 | −0.79 | 0.33 | −0.74 | NaN | 171 | 0.95 | 0.45 | −1.11 | −0.00 | 2.66 | 0.0091 |
| 345811 | 0.34 | 0.13 | −0.23 | 0.21 | −0.03 | 0.31 | 145 | 0.71 | 0.19 | −2.05 | 0.03 | 2.48 | 0.0091 |
| 353614 | −0.11 | 0.12 | NaN | NaN | 0.41 | 0.16 | 171 | 0.62 | −0.26 | NaN | NaN | 2.54 | 0.0092 |
| 348529 | −0.25 | 0.20 | 0.05 | 0.15 | 0.54 | 0.22 | 158 | 0.48 | −0.40 | 0.25 | −0.39 | 2.63 | 0.0092 |
| 352870 | 0.55 | 0.57 | −0.22 | 0.15 | 0.28 | 0.13 | 171 | 0.28 | 0.13 | −4.78 | 0.41 | 2.56 | 0.0092 |
| 345597 | 0.34 | 2.08 | −0.56 | 0.23 | 0.17 | 0.11 | 170 | 0.08 | 0.09 | −9.49 | 0.77 | 2.55 | 0.0093 |
| 348888 | 0.12 | 0.18 | 0.19 | 0.13 | −0.73 | 0.32 | 170 | 0.66 | 0.42 | 1.17 | 0.58 | 2.48 | 0.0094 |
| 348400 | 0.95 | 0.41 | 0.35 | 0.19 | −0.09 | 0.12 | 170 | 0.20 | 0.52 | −0.15 | 0.57 | 2.69 | 0.0094 |
| 348820 | 0.15 | 0.14 | −0.32 | 0.20 | 0.37 | 0.21 | 170 | 0.66 | −0.11 | 5.30 | −0.30 | 2.37 | 0.0095 |
| 346608 | −0.13 | 0.13 | 0.42 | 0.18 | −0.03 | 0.23 | 169 | 0.62 | −0.05 | −10.57 | 0.07 | 2.47 | 0.0095 |
| 348360 | 0.49 | 0.31 | −0.70 | 0.33 | 0.17 | 0.10 | 171 | 0.06 | 0.16 | −6.27 | 1.07 | 2.55 | 0.0095 |
| 350976 | −0.11 | 0.13 | 0.45 | 0.20 | 0.16 | 0.25 | 171 | 0.69 | −0.13 | −3.14 | 0.02 | 2.41 | 0.0097 |
| 349603 | 0.05 | 0.12 | −0.10 | 0.20 | 0.85 | 0.30 | 170 | 0.78 | −0.40 | 1.38 | −0.71 | 2.56 | 0.0097 |
| 347423 | 0.25 | 0.13 | −0.30 | 0.16 | 0.60 | 0.43 | 170 | 0.76 | −0.18 | 4.10 | −0.55 | 2.62 | 0.0097 |
| 349988 | 0.29 | 0.14 | −0.26 | 0.16 | 0.34 | 0.26 | 171 | 0.68 | −0.03 | 20.29 | −0.24 | 2.53 | 0.0099 |
| 343688 | 0.67 | 0.32 | −0.54 | 0.24 | 0.14 | 0.12 | 167 | 0.13 | 0.27 | −3.54 | 0.95 | 2.80 | 0.0099 |
| 352122 | 0.29 | 0.14 | −0.26 | 0.16 | 0.34 | 0.26 | 171 | 0.68 | −0.03 | 20.29 | −0.24 | 2.53 | 0.0100 |

Locus is the ParAllele identifiers of the polymorphisms,
N is the number of genotypes,
mean_0 is the mean net feed intake for genotype 0,
mean_1 is the mean for genotype 1, and
mean_2 is the mean of genotype 2,
SE is the standard error,
a is the additive effect,
k is the dominance effect,
alpha is the average effect of allele substitutions,
tmax is the value of the t test, and
PermP is the P value determined from 100,000 permutation tests expressed as a positive integer.
A minus value for a means the mean of genotype 0 is lower than the mean of genotype 2, and a minus value for alpha means that selecting for allele 0 will reduce the average values of net feed intake in the population.

TABLE 6
DNA Sequences for SNPs from Table 4

| | V1 | | | | |
|---|---|---|---|---|---|
| | Scaffold | | Alter- | | |
| | or | | na- | | SEQ |
| | IBISS4 | | tive | | ID |
| Locus | No. | 5′ Flanking Sequence | Bases | 3′ Flanking Sequence | NO: |
| 354186 | SCAFFOLD | TTCCTGTAAGAAGAATGAGAGTTATAATATGCAAATATA | G/A | ATCAATATATTCTATAGATTGCAATTCATTTGTAATGAA | 80 |
| | 285370_ | TCATATTAATGGTATATTATATTTATTTGATGACATCTT | | AAACTATAAATGTATTGCAGGCTGTGCCCCAAACATACT | |
| | 4357 | TTCCAATTAAATAGGAAGAATTACATTTGAACAAATCTC | | TGCTCTATTGTCTGTACCTTCTTTTGTTCTTCCTTCTCC | |
| | | ATAAATTAAACAATGCCTTCCTCTGTTTTGTTGAAATTT | | CTGGATGTGTAGGTAAGGGATGTCACCTTACAGAGAAAT | |
| | | TTAATAATTTTATTTGATTAGTGGGTTACTATTTAAAGA | | TCCTTCAGGGTCTTTGGAAAAATAGGAACTGAGTTATTT | |
| | | ATCCTCAAACACTATAGCTTCTGTCTATACAATTGATTT | | CACTCATAGCCTCTCCAACCCCCTCTGTCAGGCTCAGCT | |
| | | GTTCATTTTTTTATGA | | TTCCTCAGTCACTCTG | |
| 350075 | SCAFFOLD | TGTATTTGAAAACTTGTTAAGGTTTATTACATTTCTAAT | A/C | AGGCAATGGCACCCCACTCCTGTACTCTTGCCTGGAAAA | 81 |
| | 205874_ | ATAAGAAGAGATAATAGGTAAAGGATAAGATACAAACTT | | TCCATGGACAGAGGAGCCAGGTAGGCTGCAGTTCATGGG | |
| | 730 | GAACAAAGGTCAGTAGGTTCAGTCTGTATACAGAGGAGC | | GTCGCTAAGAGTCCGACACGACTAAGGGACTTCACTTTC | |
| | | AGAAAGTTATCCCTGTGTTTCTGATTTAACTTAGACAAA | | ACTTTTCACTTTCATGCATTGGAGAAGGAAATGGCAGCC | |
| | | AAATGGGAGCAAAGAAAGGGGAAGATCTAGAATTTTTAA | | CACTCCAGTGTTCTTGCCTGGAGAGTCCCAGGGACCGGG | |
| | | GATTGAAGTGTCTAACATTTAAAAATACTTCAATAGTTC | | AAGCCTGGCGGGCTGCCCTCTATGGGTTCGCACAGAGTT | |
| | | TATTATAATAGTTCAC | | GGACACGACTGAAGCA | |
| 345371 | SCAFFOLD | TGTTCCCAGAAGCAGCCCCCTTTCTCTATCCTGATGGAA | A/G | GTTATCGATTGCTGAATAATGATAATTATTTCTTTAAAA | 82 |
| | 11084_ | GATGTGAGTGGCCTCGGGTGCATCATTGGTATGCACACT | | AACAACATTCTCATCATCCAAAAACTATGAACATTAAAT | |
| | 11208 | CAGTGGTCTCTGGCTATGGAAAAGTAAGACTTCGAGCAC | | AATGGAGAGGATGTGGAGAAAGGGAACACTTTTGCACTG | |
| | | TCACCTTTGGTTTTCTGAGCCACGACTCCTGAAAGGCTT | | TTGGTGGTAATGTAAATGGATATAGTCAGTATGGAGAAC | |
| | | AGCAGAAAGCAGAGTCCTGGAACAGTGAAACAGAAGGGA | | AGTAGGGAGATTCCTTAGAAAACTAGGAATAAATTTACT | |
| | | GACACGTGAAATGGTTGAGGAAAGATTCCAGGATATTCC | | GTATGACCCAGAAACCCCACCCTGAGCAAAACCATAATT | |
| | | CCAAGGGCTGGGTATC | | CAAAAAGTCACATGTA | |
| 349676 | SCAFFOLD | AATTTACAGAAAGTGAAAAACCCCTACGTGATTGTTGAA | G/C | ATTGCTGAGTTGATTACTGGAGAGGAGATAGGAATTTTT | 83 |
| | 7023_ | ATAAATGTGACAGTGGAACTGATGATGCAAAATGCAAAA | | CCTAAGGAAGAAAGAATTACCTAAGAGGAAAGCTCAACT | |
| | 4826 | TTCTCATTTCTCCAAACCTTCTTCATATTTATGGACTAG | | CTTTCCTTTTTGAGGCTCAATCTTATAAACACCACTCTG | |
| | | ACAAGTCTTTCTGGGGCAAATATTTATTTTGAAAAGTGC | | ACAGACCAGATCTTTGAAAAGTCCAGTGACATAAAGGTC | |
| | | CACTTGAACAGACAAAATTAACTTATTACCCAGGTGAAA | | TCCAATGTCCCCAGGGAGGAACTCACTGTGGGAGAAGGT | |
| | | AAGGACAATACAAGCTTCTTTGGCTTAAAAAAAAGTTGC | | AGAATTGAACAGGTGAGCAAAGTGAAAGATTAAAGTGGA | |
| | | TGTTATCTGATTTTG | | AGATTGACTTGGGGAG | |
| 350777 | SCAFFOLD | CGATGATATAACTCTTTTATTGTATTAATGGGATATATT | T/A | AAAAAAAAAAAGTGAAATTGACGAACAGTTTTCCTTTAC | 84 |
| | 166086_ | TCCTAGTATTTGTTTATTTATTTCATTTGACTGTGCTGG | | TTGTCTGTATGTAAATCTGCATTCTGACTGCACAGAGAA | |
| | 6743 | GTTGCCGGATCTTCTATCTTCCTTTGGGCAGCTGGATCT | | CTCGGCTGTATCCGTAACTTTGGAGAAAGTCCCTGACCG | |
| | | TTAGTTGTGGCATGTGAACTCAGTAGTGGCATGTGGGAT | | GCTCTAGCTGCTTAAATTACCTCAGGTCCAAATCTTCCG | |
| | | CCAGCTCCCTGACCAGGGATTGAACCAGGCTCCCTGCTG | | CTGCCAGGTGGGCTGGACTCTCAGCCAATCCCAACCCGC | |
| | | GAAGTGTGTAATCTTAACCACTGCACCACCAACTAAGTC | | TGGTCGGGGAGAATAAAGGGAAACAAAGTTCTAGTGGTC | |
| | | CCCATTTCCCAGTATT | | AGCGTGGACTGTCTG | |
| 344359 | SCAFFOLD | TAAATAGTTCCAGTGCCGGGTTCTGGAGGGGAGTGTCCA | A/C | CAGTAACAGCATGGGGAACTTTTACATTTATATTTTGTC | 85 |
| | 55579_ | TCAGGTTTGGCCTGCTCAAAAAAATTTCATCTATGACCT | | CCAGTATAAGCTTATCTGCTTCTCTGACCAGGACCACAG | |
| | 11178 | CCTTGCAGTTATGATCGAGGGTTCCCACCTCTGTAGGTA | | TGGCAGCCAATGCCCAGAGACATGGCAGCCATCCCGTGG | |
| | | AGTAGGTAAGTAGGTGGTGGGATTCAGTGTCCGCACAGT | | CCACACAGTCCAGTTGTTTGGACAGGCATATGACCAGGC | |
| | | CTCGAGGTGGACCTGTGGGTTTTCACAAAGCAGTCCCTG | | GCTGCTATGGTCCAACTGTTTGCATGAGGACCCCCAGTG | |
| | | ACAGTGAGTCATCCTGGTATTGGTCAGTTACTTGTGCCC | | CAGTGTGATTTTTCTCATGCACAAATAAGTTAAAGTCCC | |
| | | TTGGCTGTTCATCAGC | | ATGTCACATCTGGCAG | |
| 345126 | SCAFFOLD | TGATTTCCTGGTAAAGCGTCTGCCCACAATTCGGGAGAC | G/A | TGGGTTGGGAAGATCCCTTGGAAAGGAAATGGCAACCCA | 86 |
| | 50281_ | CCGGGTTTGATCCCTGGATCGGGAAGATCCCCTGGAGAA | | CTCCAGTATCTTACCTGGAGAATTCCATGAACAGAGGAG | |
| | 6253 | GGAAACAGCAACCCACTCCAGTACTCTTGCTGCCTAGAA | | CCTCAAGGGCTATAGTCCATGGGGTCACAAAAGAGTCAG | |
| | | AATTCCATGGATGGAGGAGCCTGGTGGGCTACAGTCCAC | | ACACGACTTAGTGACTCAACGACAACAACATCATCAAAG | |
| | | GGGGTCGCAAAGAGTCGGACACGACTGAGCGACTTCACT | | CCTCGTGTACTCTGAATTTTTAAAAAACGTGTGCCAATA | |
| | | TCTTCAAAGCCATATCTGGGCTGGTAAAAGAATATGCCC | | CATTTGTTCAAGCCAGTTTGGCTTGCAACATTAAAATCC | |
| | | TCAGTGGATTTGATCC | | TCACTGATACATTGCT | |
| 347062 | IBISS4 | TTAATGTCAGCATAGTAAACTGTGTCGTTACTGAGGGGG | G/C | GGTAATTCAGTCTCCACTTTGTGTATTGTGTTGTCTTTA | 87 |
| | snp161 | AAGTGGTTGAT | | TACGCGAGGAA | |
| 348806 | SCAFFOLD | TGAGAAAGAGACCAAACCTTCCCTCACGTACAGCCTCTG | A/G | TTATATCCTGTGGCTTTTGATTTTCTGAAAATTGCACTT | 88 |
| | 7170_ | TGGGAGTCTGGGGTGTAAACCTCTTCGTCTGGTGTTGAG | | TCATAGTGTAGAGAAAAATTGTTAGGAAACCAGAAAAGG | |
| | 3304 | TTCTCTTCAGGCCACTGTAAACCTAATGGCAGGGAGTTC | | CAGGAGCAGCAGGCAGGCAGACGAGGACCCTCAGCTGAC | |
| | | CTTAAGGACAGTTTGGGGCTGCCAGCCTGGAGGGCAGGG | | GAGTGAGGATGGGGGATCGGATGGAGTGGGAATAGGGGG | |
| | | GGTGGTGACCTTGAACCTACCAGTGACAGGAGCAGCAGG | | GTCCACATATGGGGCCCTCCCCTCCTGCACACTCCCCCT | |
| | | TGTCAGCTTCTTACCCCTTTTGCATAAACAATTCATGAT | | TCCATTTCCATTTCTCAACACAGCAAACACTTCTGAGAA | |
| | | GGATTCACAGGGGTTG | | AATTAAAAGAGTCTTA | |
| 343136 | IBISS4 | ATCTTAATATTTGGCCTCTTTGAAGAGACAGCCCTTGCT | T/C | CTTTCCTACTGCCCTGGAATGGGTGTTGCCCTGAGGATG | 89 |
| | snp69 | GCTTT | | TATCCCCTCAA | |
| 348798 | SCAFFOLD | CTTCATATTTATGGACTAGACAAGTCTTTCTGGGGCAAA | A/G | TCTTATAAACACCACTCTGACAGACCAGATCTTTGAAAA | 90 |
| | 7023_ | TATTTATTTTGAAAAGTGCCACTTGAACAGACAAAATTA | | GTCCAGTGACATAAAGGTCTCCAATGTCCCCAGGGAGGA | |
| | 4924 | ACTTATTACCCAGGTGAAAAAGGACAATACAAGCTTCTT | | ACTCACTGTGGGAGAAGGTAGAATTGAACAGGTGAGCAA | |
| | | TGGCTTAAAAAAAAGTTGCTGTTAATCTGATTTTGGATT | | AGTGAAAGATTAAAGTGGAAGATTGACTTGGGGAGGCTT | |
| | | GCTGAGTTGATTACTGGAGAGGAGATAGGAATTTTTCCT | | CGACATGGGTTATAATTCAGTGAAGACCAGAAATACATA | |
| | | AAGGAAGAAAGAATTACCTAAGAGGAAAGCTCAACTCTT | | TAAACCCAACCATTTTGGCAAATTGGTTACGGAAGCAAG | |
| | | TCCTTTTTGAGGCTCA | | TAATCATTAAACTTGA | |
| 349583 | SCAFFOLD | GTCCAGATGCCTTGGCAATCCAGAATGCAGTCAAGAATT | A/G | CTACAGAATCTGTTACAGTATTATTACTGGTTATTAGAA | 91 |
| | 35711_ | AAGTAGGAAAAAATAATCTGAAAAACTCAGTGATTATTC | | AGTAGATTAAAACCTACCCAAAGTAGGCAATGGAACAAA | |
| | 6569 | AAAAGTCTGGTTACTAGTATTTATGTATTTACTAATACA | | AACATAGAAATCAGAATCTATTTAGCAGGATATCCTATA | |
| | | AGCCCTTGTTTAGCTCTGATGGGTAAAACCTTTCTTTTG | | CCTTAGTCATCTTCGGGGAAAATAATCACAGTATATCGC | |
| | | TAAGTTTTTAAAAAGTTGATATTTGGTTTCTCAATCCAC | | CTGACAAAAACATAGTAACCAAACAAATTTTAAATAAAT | |
| | | AGTACAATGGAAAAAGCCTTGAGGGGAGGGGCTAGGGTG | | GTTTGCTATATTAAAATAGAACAAAAAGGCTTAGCGTGT | |
| | | GAGGAAGATCTCAGAG | | GATTTTTCATGTTTTT | |
| 344029 | SCAFFOLD | TGTTTGTATGTGACCAAAGCATCATTAGTCCCACCACCG | A/G | AAGAGTGGTGTTCCTCCTGGCCTAAGATTCCGGGCGTTG | 92 |
| | 195103_ | TGAGACTGTTGCTATTTGCTACTATTCACTTCTGTTGCC | | CCTGGCAATGCTGCTGTGTACCCCAAGTTCCCCAGGGTG | |
| | 30086 | ACTGCTGCTGCTATCCAAACTGTCGCTGTCTTCAGTACT | | GGCCCTTTCCCTCCCTGCCACCAAGCTGGCTCAGCTTGT | |
| | | GCTGTCAGTTTCTATCTTCCCAGTTGCTTATAGTCTCTG | | ACAGTAAGCGTGTCACTGGTCTCCAGCTTGTGGCCAACT | |
| | | ACATCTGTCACTAGAAAGCTGGAACATACACAGCTCGTG | | ACACTCACATGTCTGCCACCCTGTCCACTTGAGGTCTTA | |
| | | AAGTAATTCGGATTGTGGCCGAAAGTACACTAGGAACCA | | CGCACCTCTTTCCCTAGCATACTGCGTAAAAACACTGTC | |
| | | GCACTGGAGGTACCAG | | TTAGCTCAGGCTGTGG | |

TABLE 7
DNA sequences for further SNPs identified in the analysis

| | | | | | |
|---|---|---|---|---|---|
| | V1 | | | | |
| | Scaffold | | Alter- | | |
| | or | | na- | | SEQ |
| | IBISS4 | | tive | | ID |
| Locus | No. | 5′ Flanking Sequence | Bases | 3′ Flanking Sequence | NO: |

| | | | | | |
|---|---|---|---|---|---|
| 344786 | SCAFFOLD | TTCACCTTCCTCCATTAGAATGTAAGCTCTATTTATCTG | A/C | TCCCTTTGTCCAACAGCCACCAATTCCAGCCAGTTTTTT | 93 |
| | 206105_ | TCTAGTTCCCTATTATGTTTATAGTACCTGGACCATTTC | | CTCATAACTGTTTCTCATATCTGCCTCCCAACTCCATAT | |
| | 7435 | TGGAACATGGTAGGTGCCCAAATATTGAGTGAATGAATA | | CTGTGATTACCACCTTGTTTCAGACCCTCAAACCTGTCT | |
| | | AATCTTCCTTCAACCCCAGACTGATTTCTATACCTTTTA | | CTGGGAAAAAGAATTCATTGTACTTTGTTGATGGGAATG | |
| | | TCTTGATGAGTGCCACCACCCCTATCCTCAGTCCCTTAC | | TAAAGTAGTACAGCCACCATGGAGAACAGAACGGAGGTT | |
| | | CTCAGAAACTTGGGTGTAATTCCAGAAACATCTGTCACT | | CCTCAAAAAACTAAAAATAGAATTACCATATGATTCAGC | |
| | | ATCACCACATCTCTGC | | TATTCCACTACTGGGC | |
| 347283 | SCAFFOLD | TTCCTCTGAACACATTTTATATGTTAATTCATCTTCTTA | A/G | GGCAAAGAATTCATCCCCATCCTTTTACAGATATCGTTC | 94 |
| | 170246_ | TGGATCTATTATTTCTAAAATTGCCAAAGCTAAAATAGT | | TTAAAAACAGAAAGTGTAATATGCTGAACATTTCCTATC | |
| | 10502 | GGCATTACATAATCTATGTTCCTAGGCCTATAACTCACC | | ACATTTCCCATCACACTGCAGATATTCAATTAGTATTTG | |
| | | AAAAATTTTAACCTAGAATTTACTATCATTGTTCAACTT | | TTAAAAATAATTCATTAAAATTAAATTCATTACTTTTCT | |
| | | AGCAATAAGTGGTCAGAAAGGCAAAGTGGCAGTCATACA | | TAATACTGATTCCCAATTAAGTTGTTTCGGAATTCTGTT | |
| | | AGTGAGTCTGTGTAAATGTTTGCGACATCGTAATTGTCT | | CTTAATTCTTTTCTTGAAGTGGGTCTCCTTGCAAGGAAT | |
| | | GTGCCAATTGAGAATC | | AAAGAAAGACAGAAAC | |
| 351702 | SCAFFOLD | TTAGTGGCAACTTAGCCTTTACTTTAAAAAAAAAAAAAA | A/G | TAGCTTCTGTCTATACAATTGATTTGTTCATTTTTTTAT | 95 |
| | 285370_ | AGGTTCCTGTAAGAAGAATGAGAGTTATAATATGCAAAT | | GAGATCAATATATTCTATAGATTGCAATTCATTTGTAAT | |
| | 4315 | ATATCATATTAATGGTATATTATATTTATTTGATGACAT | | GAAAAACTATAAATGTATTGCAGGCTGTGCCCCAAACAT | |
| | | CTTTTCCAATTAAATAGGAAGAATTACATTTGAACAAAT | | ACTTGCTCTATTGTCTGTACCTTCTTTTGTTCTTCCTTC | |
| | | CTCATAAATTAAACAATGCCTTCCTCTGTTTTGTTGAAA | | TCCCTGGATGTGTAGGTAAGGGATGTCACCTTACAGAGA | |
| | | TTTTTAATAATTTTATTTGATTAGTGGGTTACTATTTAA | | AATTCCTTCAGGGTCTTTGGAAAAATAGGAACTGAGTTA | |
| | | AGAATCCTCAAACACT | | TTTCACTCATAGCCTC | |
| 353387 | SCAFFOLD | CTAGGCAAGAACACTGGAGTGGGTTGCCATTTCCTTCTC | A/G | TGCAAACAAAGAAAATCTTCACACCTACTTGGAGAGTAA | 96 |
| | 76898_ | CAATGCATGAAAGTGAAAAATGAGAGTGAAATTGCTCAG | | TAGTGAAGATTAGCAGAAATCAAGGGTGAGAAATAAAGT | |
| | 3031 | TCATGTCTGACTCTTAGAGACCCTATGGACTGCAGCCCA | | AACATACTGCATGGTAATTGGGAGCTGTCACTAAATCTT | |
| | | CCAGGCTCCTCTGTCCATGGAATTCTCCGGGGAAGAGTA | | AGTTTCTCTCCTGTTCTTTCTTCCTTTTGTCACAAATAT | |
| | | ATGGAGTGGCGTGGCATTGCCTTCCCCGGTGTACCCAAC | | TCTTCAGGCACCCGATTTCTCTGGTGGCTGAGATGCTAA | |
| | | TATATATCCTTAAAAATATGTGACACAAGTAAAGACTCA | | AGCATCTGCCTACAATGCAGGAGACACGGGTTCAATCCT | |
| | | AATATTTGTTGAATAT | | TGGGTAGGAAGATCATC | |
| 345292 | IBISS4 | TTGGAGCTTTGGTGTTCCTGCTGATGTCATTTCCATCCA | T/C | CTGATCCACTCAGTGTTGTCACCAGATCCGATTTGTAAC | 97 |
| | snp168 | CATACCCCCGA | | CCACTGAGAGG | |
| 351344 | SCAFFOLD | GGGTTCTGTCTTTACTCTTTCATATTAGAAATCTTCCTT | C/T | AGTTACAGAGTTATACAGCTACACATACTCATTTGTACT | 98 |
| | 100386_ | TCTTAATGATTCAAGATTTTTTTCTTCTTTTCCCCAGGA | | TGTTTCCATATTATATAGATTTCCATATTATTTTTACTT | |
| | 1493 | CACATTAAAGTGCATGGCATGCTAAAGGTGTTCAGTATT | | CATAATTTATTCCAGAATCCATATTTCAAAATACATTGC | |
| | | TTCTGAATGTTAAATTCAGTTCAGTTCCCTTCAAGTCAC | | AAAATAAAAGATTACTTGTAAAAGTTTGATAATTAAGGG | |
| | | TCAGTCGTGTCCAACTCTTTGCTTACTTGCCCTTTAAAA | | CTTAAGTTTTAGTTGTTATTTATTTATAAATAATAATAT | |
| | | GATAGATATAGTCTTAGGTTTGCTTTTATATTCCTTAAC | | GTTATATATAAATGAGTAATCATTCACTCATTTAACATT | |
| | | ATCTTAATTGCATTTA | | CACTAATTTAGTAAC | |
| 350444 | SCAFFOLD | GGAATGCTCTTTTTACAGAAAATTTATGCTCTACACTTT | T/C | CAGAGGATCCACACTATTTGTGATTCAACCCCATATTCT | 99 |
| | 51917_ | ACAGGCACTGCATGTTAATGAAGGAAATAATGGCTAGAA | | GAATGAAGACTAAGCTGAGTTGGTAACTCTTATGACCTT | |
| | 2160 | GCTTATCATATGCCTCTGGGCTTGTGTCATGTTGCTTAC | | TGCGGGAACATGTATCCCTTAAGTGGATGAGGAAGTTAC | |
| | | AGGCATCATTCAAGCATCTACGTAGTCACTGGGTATACT | | CACATCTCCATATCCCTTGATTCTGTCTAGGTCAAGACT | |
| | | ACTCTATAATGATTGTTGACCACTAAACCACTTCATCAT | | ACCTAATCCTTTCTTTGTTTTCCCAGGTCTTGGTGGAGG | |
| | | CTGCAGCA CTTTTCTTACAGGGAGAACTTGCATGACTT | | TTGCACATAGCATCCTCCTTTCCAATATATTGTTCAGAA | |
| | | TTAATTAATGCGTGGTT | | TTAATTTTCTTAGGAA | |
| 346634 | SCAFFOLD | TCTTATGAACAAGGAGATCTACAGGAGCCAATCAGGGCA | C/T | GGCATGATTCCGAGTAGCTAAACTGCTCTCTGTAAGAAT | 100 |
| | 25012_ | GGCTATATAATGTGCAGGGCCCAGTGCAAACTGAAAGTC | | ATGACGTTCAAAGGCAGAAAGCTGGACTGTTTGACTTAC | |
| | 4993 | CAGGACCATCGTTCATTAATTCGAAAAATTCCAAAATAG | | CACCACATCCCTGAATACAGAATAGGTGCTCACGAAATA | |
| | | TGACAGCAGAGCATTAAAACAAACCCTTCTTCTAAGTAC | | TTTTTTGGCAAAGGGGGGAAATGAGGAAACGAACATAAA | |
| | | AGGCCCCTGTGGGACTGCACAGGGGACAGCCACATGGGG | | ATAATTTGTATGCAGTAAGTAGGTGCGTCATTACAGATT | |
| | | CCGATTCATTATTCGAATGTGGAGTGTAGAACCTCTTCT | | TGTGTCTGCTTTCAACCTTCCTCTGTAAGAAACTGACCC | |
| | | CATATGGAAATGGTTG | | ATTCATTTCAGTTCAG | |
| 346987 | SCAFFOLD | AATGGAGCATCTGATAGCATCTACTCCCTTTCTTGGTTC | A/G | ATAGATGACTAAAAGCAAAGGAAGCTTATAAAGAAAGCG | 101 |
| | 76322_ | AGATCATGAATGTGGCTCCTCTCAGCTCTCTAAGTCACC | | GGACATTTGCTTATGGATGGACAGGAAGGAGAGAAAGCA | |
| | 7745 | AGCTTTTGAGTATTTACAATCTGTGACAGTACAAAGAAA | | TCGTGCCCAGCAGCCACTTAGAGAAGCGTCTGCACAGGG | |
| | | TGGATTTTGAACTCTAAGCAGCCCATGGTAGAAGCAGGG | | ATTAAAAAAGGGCTTTCTTCAAGTTGAGAAGAAATAAGG | |
| | | AAGCCACAGCGGAAGCAAAACCAGAGTGGGTCCTGATAA | | AAGTTATTCTCTTGAAAAGGTCGTGGTAATTTTAAAGCT | |
| | | CAGTGAATTTTCTGTAAGTGGGAAGGAGTTATGAAAGGT | | GTGAGTGTGTGTATGCTCAGTTGTGTCTGACTCTTTTGT | |
| | | GGCAGAGAGGAGTGAC | | GACCCCCATGGACTGT | |
| 348902 | SCAFFOLD | GTCCACCTAAACCCATGTCCATCGAGTTGGTGATGCCAT | T/C | GAGTGTGCACTGATTGCAAAAAAGACTCTTAGTAACTCT | 102 |
| | 100431_ | CCAACCATCTCATCCTCTGTAGCATATGTATAAAATTTT | | TCTTAAAGTTAATGAATAGAGACCTCCTATGTGGTGTGA | |
| | 15454 | ATCATTGCTCAGGTTTGTTTGCTACCATTTTGAAGAGAA | | AAATATTCTTCCTACTTCAGTTCAGTTCAGTCGCTCAGT | |
| | | AAAAAGATGGATCTAAGATCCCATGAAAGACCATATCTT | | TGTGTATGACTCTTTGTGACCCCATGAATCGCAGCATGC | |
| | | GGTTAGCTAAAAGACCTAGGAAACCTCTTAGGATAGGTT | | CAGGCCTCCCTGTCCATCACCAACTCCCAGAGTTCACTC | |
| | | CTTTCATGAAGGAGTCAAAAAACTGTCAGTGATTAAAAA | | AGATTCATGTCCATCAAGTCAGTGATGCCATCTCATCCT | |
| | | AGAATAGAGAAAGTCA | | CTGTCTTCCCCTTCTC | |
| 349297 | SCAFFOLD | GTAAGCTGTAGTTTAACAAGCCCTCCAAGTGCTACTGGT | A/G | CATGTATGTTAGGAGTTTTTGGTGACTCTTCAAGGTGAG | 103 |
| | 230342_ | GTACAATGAGGTTCAAGTACTGTAACACATATTCTTAAC | | GGGTGGGTGGGCGATGGGTGTGATTTCTCTGCTTCTGAA | |
| | 10541 | TTTTAATTCCTTGGCTAGGAAGGTGCAACGAAACACCAT | | GGCACAGACAGGATCTTTTTGAAATAACCCAGAACTCAC | |
| | | ATTATACTTTGATCATCAACCAGTGATTTTATTAACTCT | | TGACTTTGGAAAGATAACGAGTAATACTGACACCGATGG | |
| | | TATCTTAAACTTTTTCTACACATTTTTTCCTGTTATTAG | | CTTTTATAAGCAATTCTTAGATGCATTCAATTCTGGGGA | |
| | | AAACATAACATTACTGATTTATCCTGTGGTCTTTAAACG | | ATCCTCTTTGCCCTAGAAGAATTGAGACTGTGATACACT | |
| | | TGTTTTTTCACCCAGAC | | GAGTTTATAATCTGGG | |
| 347122 | SCAFFOLD | TAGAGATGATTGAAACTATACAGCAGGATGCACGTTATA | C/A | CACTGGTAGTCTTAGAACAATGTAACAAAATCCACCATC | 104 |
| | 11052_ | TGTAAATACTATATCACTGTATCCAACGGACATGAGCAT | | TCCACAAAATAAAATTCAAATGTCCACTTCACATACCAG | |
| | 910 | CCACGAATTTTGGTATCCATAGGGCCTGGAACCAATCCC | | AATTACTTGACATATGAAGATCCAGGAAAATAAAACCCA | |
| | | CCACAGACACCAAGGGACAACTCTACTTTTTAAAAGACT | | ACCCCAGGAGAAAAGTCAGATGCTAGTTCCAAGGTCAAC | |
| | | ATATCACCAATGTATGCATCACATTCTCAGTTAATGAGA | | CAGATGCTGAAGTTACCATCAGGTAGAGACTTTAAAGTA | |
| | | ATTAGGACTGCAACATATGAATTTGAGGAGAACATAACT | | GAGCTTATAACTGGGCACAGTGAGACAAAGAAAAATGTA | |
| | | CAGACCACTGGCTAAA | | CCTACAAGGAACTGGA | |
| 349965 | SCAFFOLD | AATTGCCAAAGCTAAAATAGTGGCATTACATAATCTATG | A/G | ATATGCTGAACATTTCCTATCACATTTCCCATCACACTG | 105 |
| | 170246_ | TTCCTAGGCCTATAACTCACCAAAAATTTTAACCTAGAA | | CAGATATTCAATTAGTATTTGTTAAAAATAATTCATTAA | |
| | 10559 | TTTACTATCATTGTTCAACTTAGCAATAAGTGGTCAGAA | | AATTAAATTCATTACTTTTCTTAATACTGATTCCCAATT | |
| | | AGGCAAAGTGGCAGTCATACAAGTGAGTCTGTGTAAATG | | AAGTTGTTTCGGAATTCTGTTCTTAATTCTTTTCTTGAA | |
| | | TTTGCGACATCGTAATTGTCTGTGCCAATTGAGAATCAG | | GTGGGTCTCCTTGCAAGGAATAAAGAAAGACAGAAACAG | |
| | | GCAAAGAATTCATCCCCATCCTTTTACAGATATCGTTCT | | TGTGAGCACATTATAGCTAAGGCTTCCCAAGTGTTGCTA | |
| | | TAAAAACAGAAAGTGT | | GAGGTAAAGAACCCGC | |
| 345591 | SCAFFOLD | CACAGCCAGAGAAAACACCCCAAAATCGTTTTCCAGGGC | G/A | TGCTATTTCTTCCTGACTCCCTCAGAGGACCCTGGTGGA | 106 |
| | 190194_ | ATCTGTGCCCTTGTGGAGGCTGCCACGATGTTTTAATTG | | AATGTGTCTAGAGGGGTTCTGTTGGTGGAAGGCATCCAG | |
| | 25419 | AGTTGGATTGAATTGCTACGGAGGGAGCAGAAGCAGTGC | | GGAGGTTGTCCAGATTGGGGAGCCTGTGCGAGAAGCCAC | |
| | | ATTTTCAAGGACTAATAATTCTGTAATTTTGGAGGCGGG | | GTCCAGCATCATCGAGTCCTTGGTTACACACTCAGCTTT | |
| | | GCATACATTTCTTGGCACAAATAGGCAAAAGGCATCTGC | | CTCGTTGGTATCTGCACACTTCACTCCTGGGTCACTGGC | |
| | | ATTACTCTACAGCAGGCATTCTCATTTGGAACAAGACCA | | TTCTGCTGAATCCACCCAGTTCTCCCAGGAGCTGACCAC | |
| | | GGACTGTCAAAAGTGC | | GTGAAAGGGTCGATACA | |
| 347733 | SCAFFOLD | TTCAGGCAAAGGGAAGAACATGTGTAGCTACCCTGTGGT | T/C | ATATACTCATATTCAGCCTTCACTCAAGCTGTACTTAGG | 107 |
| | 316970_ | GGGAACCAGCTTAGCCATCAGATCAAGCAGCAGAAAGGA | | TTCTTCAAGATGCCCTCTTTTAGCAGTGTTATAAACACT | |
| | 12453 | GGTGCCTATTGCTGGAGTGGATGCGAAGGAGGAGGAGAG | | AAAATTGTTTTAAAAACATGCAGATACCCATATGTAACT | |
| | | TCCAGTAGACAGCCATCTAGATCTCTGCTCATCACATGG | | ATTGCAAAAATTTTTTTTCCTGAATTGCTCTCCTGGAAT | |
| | | GATCCCAGTAACAACTCTTCTCTTGCATCCAGAAAGTTT | | TCTAGCACCATGTTCCCTCACACTTCTGTCCCTTTACTC | |
| | | AAAGATTCTCAGGGTCGGAAGGGACATTTCCCAAATGCT | | AGTGTTTTCTCTACTTGAAACTCCTTCTTCCAACTTATT | |
| | | CCCAGTCTCTCTTCTC | | CTTTGTGTTTTTTTAT | |
| 350995 | SCAFFOLD | GACCTTCAAGAGAAGCCGATTGTTTACAGGATAAAACCC | C/T | CCTGTGTTATGCTTTCTTTGATCACTCCCACCTTCCCCA | 108 |
| | 265171_ | AGATTCTATAACAGAGAATGAGTCTCTTCACATCAGGCC | | AGCTTCCTTCCCATGAGTTGACTATGTTCTTGTGTCACT | |
| | 9413 | CCATAAGCATCTGTTACCTGATGTTCTCCTACATTTAAT | | ATCTCTAACACATATCCTTATCAAATACTGTAATACGAT | |
| | | CTTATGAAACTATTCTTCCCAGAATGAGTAATATTGTTC | | TATGTACTGACATCTTGTCTCCCCCACTGTGACACCGAG | |
| | | CCTTCAACTCCATGCCTTTGCAAAATTCTCTTATTTTTA | | AAGGGCCTGGTGGGACTCCTGGGCACAAAGCCTTTCTGT | |
| | | AAGAATGCTCTTCCCTGTTTGATCTGCTTAGCCAATACC | | GCCCATGACCTTCCCTGAGTTCCAAGGGGGAAGATACAA | |
| | | TACTCATTTTTTAAGA | | CCAGTTGTTAGTTAGA | |
| 345261 | SCAFFOLD | ATTGATATCAAGAAGTATTTAATTGGGGAATGTGGTAGA | T/C | GGTCATATCCAACTCTTTGCTACCCCACGGACTGTAGCC | 109 |
| | 95041_ | GGTCTGTGTTGTCAGATTGACAGATTAGGATTATATCTA | | TACCAGGCTTCTCCAGCCATGGGATTTCCCAGACAAGAG | |
| | 43584 | GATGGGATATTTAGAATGCAGGATCACAAATGCCCCTTC | | TACGGGAGTGGTTTGCCATTCCTTCTCCAGGGGATCTTC | |
| | | CATTTCTAAACTCGGTAGTCCCCCATTTTGCTCTTCACG | | CAGATCCAGGGATTGAACCCGGGTCTCCTGCATCGCAGG | |
| | | CACTTAGAATCGGGCCTCTGTAACCCAACTGAACTCATT | | CAGATGCTTTACCATCTGAGCCACCAGGGAAGCAGGATA | |
| | | GCTGCTTGTGTTCTCTCGATTGTCGGGATACTCGGAAAC | | CTCTAGAAATTATTAATAATTGAAATATATTGAATGCTT | |
| | | TGGGACTGAAGTCGCT | | CTAATATAAAAAGTC | |
| 343500 | SCAFFOLD | AATGTTCTAAAGTTAAATGTTATTTAAGAAAGCAGGAAC | C/G | CTTCATCAAATCGCTCCAAAAAAAGAGTTTTTCCCTGAT | 110 |
| | 256107_ | ACAGAGCCACGTTCCTCATATACTGTTGTCTTTCTTCTT | | TATTCCAGTTCACCACTTATTTACTCTTCAACTCTTTCC | |
| | 8432 | CACTGCTTACAAACACATTCACAATCCTTCTCAATCACG | | TAAGTGCCCCAACCATTTGCCTGAAATGCCCTTCGCTGG | |
| | | AAACACCCAAGATCTCAAAAACTCAGACAATAGGCATTT | | TTCCTTGTAACTTCCTCACCTCTCACTACAAAGATTCCT | |
| | | CCCAGCCCCAAGAAATGCAGTCGAGCAGGGAAGACACAC | | CTCCCTGCCCGCTCTAGATGAGTAAAGGCTGATCACGCT | |
| | | AAGAAAATGAGAGCTCAGCTAGGGAACCATCAGAGTACA | | TCCTTTTTTTCTGAAATTCTCTTTTGTTATATTCAGTTC | |
| | | GAAGAGGGTGCCCAGT | | AACTTCAGTTTAACAA | |
| 346106 | SCAFFOLD | CCAAATAAAAAATCACAAGCCTCATTATCACAGTATTGA | T/C | GCAAGCCTAGCACTTAGTGAAACCCTGAGCATCCCACAA | 111 |
| | 70728_ | TTATATGGCAATAACAACCCTCACCATGAGTGAAAGCTT | | TTGACCCACCTGGCTACACACAGCTTTGAGGAACAGACA | |
| | 7857 | ACACTATTAAAGGATTATGAGCTTATCTGGATATTTTTT | | GAATTATTAGTACAAATAATTCCCCTATCTCTTGATGAG | |
| | | AGCATGAGTCACAGGACAAACATTTGGAAGAGGAAAGCA | | TTATGTCCTCTATCACAGTAGCCAGGAACGCTTTCGCTT | |
| | | CCATATATAGAAAGCAAACCTGTTGCTTTTTGTCGGTGC | | GCATCAGAAAGCAGGCTCGAATCAGCTGCCCTTGGGCGG | |
| | | TGGCACAGCCCCAGCTGGCCACTAGGTGGCAGTAGTGTC | | AATCTGGTCAGCAGAGATGTGTTTGCCTAGAGCAGTGTT | |
| | | CTAGCAACAGTAAAAC | | TGCTTTTGTTATTTTA | |
| 346573 | SCAFFOLD | CAGTCTCAAGACTCCCCCAGATCTACTGAGTTGGATCTT | A/G | CTTGAAGTCTTAGTTCAAACATCTGTAGTTCCACAGCTT | 112 |
| | 226597_ | GCGTTTTAATAAGATCCTCAGATCATCAATAAGATTCCC | | TCCAGGATGGCCACTGGCTCCCCTGCCCCACTCAGCATC | |
| | 2085 | AGATCCCCTTGGCTAAAAGGTGACTGCACAAAGCCCTGT | | CACTACTGCCCTGTGCCCTCGGCAGGGACCTTGAACATT | |
| | | CTCAAAAGGGGTGCCCCATGCTTGGGGTATAATGCTCTG | | GGTATGGTGACGTCAAGGTCAGATACGAATGCCCCATGT | |
| | | TGGTGACTGACTTGACATTCTTGCTAATTTTATCTTTGA | | GCTCAATCATGAGTGATGCTTTGGGCACCTTTGAAGGCC | |
| | | AATTATATTTTGTGAGTGAAATCTGGTGGGACACTGAAA | | TGTTTCTCTGTCGGCATCCCTGTATGAAAGCAGCACAGT | |
| | | CTTGTGAGGGAAGCGG | | GTTAAATGGCAAATAA | |
| 353748 | SCAFFOLD | TTTTAAAAGATGACACTTTGATTTTAGATTCATCAGTCT | G/A | TCCAGATTAAATGTATATAAACTTAAACTGAATTGATTG | 113 |
| | 115426_ | CATCTCACCGCCCCCATAAAATAATCAACCATTCAGTCA | | ATACAAAGATAAATATGATTTAGCCCCCTTTCTGAAGGA | |
| | 13127 | ACAAATATTAGGCATGATTGTAAACATGTGAGAGAAAAT | | GCTTATACCTTAAGTGTTGAAAGAGATATATACAACTTA | |
| | | TAATTTAATTTAACAAATATTTACAGAGCAGTGCCAGTG | | CTGGAATGCCAGGCAAAATAAATCTTGTAGTCGGAGCAT | |
| | | GAAGAGATACAGCAGTTAACAATAATTGACTGTCTGCCT | | AAAAATAGTACTTTGGGGCAAAGATTAGGAAATGATTAA | |
| | | CTTTGAATTTACAGTCTGTCTGAAAACAAACAGTAAACA | | TTGGGACCTCAGGAATTGCAAAAAAACTCGGTGAATAAG | |
| | | GGTAATTACAAAGGTG | | AAGTCAGCCTAGAAGG | |
| 353932 | SCAFFOLD | AGGCAGATTCTTTACTGTCTGAGCCACCAGGGAAGCCTT | A/G | CAGTGATCATTTAAATACATTTTCCTACATTTTGCAGTG | 114 |
| | 76928_ | ACATTCAAGCAGAGGGACTGGAAAAAGCAAAGATCTGAG | | CTAAATTCATCTATAACAGAAGGATAATTTAATTCCAAA | |
| | 9451 | ACCAAAATAGGAAAGTTGGTGGGGCTGGAGCCCAGCCCA | | GGCAAATTAACCGCTCTTTGCCTTCTCCCAAAGTCACCC | |
| | | TGGGGACAAGGACTGGAAAAGCAAGTGGAGGACCAGATC | | ACTTTTGATATTTTTTTCCATAACTTGATTCAATTTTTT | |
| | | TTACTGCAGACTGTAGTAAAACACTATTTATAGGTTCAA | | CTGCTCTTGCCACATTTTCTCCAGCTCCTACACACTTTT | |
| | | ACAAAAGAGCTAAAATATCTCAGTAAGATCAAAATGATT | | TTGGATGGTTATAACGTTATTATCTTATTATTAGTTGCT | |
| | | TATTGGATTTATTAGC | | AACTGGGGATAATTCA | |
| 345696 | SCAFFOLD | AAATAAAAAATATCATGGTAAGTCAAAAGATGGGAGAAG | T/G | CGATTGAGCGTGAGTATAAATATAAGAGAAAGAGCATGG | 115 |
| | 226597_ | AAAGGAAAATGCTATTTTCCTGCTCTTTGGACAAGGAAT | | GCATGATCAGAAGACCCACATCTCTCTCTCGTTCATGTT | |
| | 1590 | CCAGCATTTTCGTTTTGGTCCTTGTAAGTTATGCTCATT | | TTGCTGGTATGTGACGTTGGGCAAGTCACTAGACCTCCT | |
| | | GAAATTTGACAAGCTTTAGTATAAGAGATGGAGAAGGAA | | TGCCTCAGTTTCCTCATCTGTAAAATGAGGGTGATGTCT | |
| | | ATAGCAACCCACTCCAATATTCTTGCCTGGAAATCCCAT | | TATGCCCCTTTCCAAATGGGCTGGGTCTAGGTTAAGGGC | |
| | | GGACAGAGGAGCCTGGAGGACTGCAATTGGTTGCAAAAG | | AGACCTGGCAACATGTCTTTGAGTAGGAATGTGTCCAGA | |
| | | ATTCAGGCAGGACTTA | | ACACCTCTCATCTTTG | |
| 344027 | SCAFFOLD | CTCCAAACATATACTGGGGTTTGCAAGAGGCCTCTGTAC | A/G | TCCCAGGTATCGTCCCAAGTGCTGGGAGTATAAGGAGGA | 116 |
| | 192022_ | TGACTGGGGTGCAGTGGGGTGAAGCCTTCCCTTTCTGAA | | GCACTCCTCAGTTCTGGCCCCCATCCCACCACTGGCCTT | |
| | 4174 | GGTCAGCCAGCATCACAGGGGTAATGCCCTCCTTTTGCT | | CACGAAAGAGAGGGCCGGGAAGTGGCACTGTTTAATCTC | |
| | | TAGGCCCTTACTTTTTGTGGATTTCTGGCAGTACAGATC | | TGGGGGAAGCCCATCCTGCAGCTTGCTAACAGATCTGAG | |
| | | ACAGCAGCCTGGGAAATACAGATTATCTGCTTTGTGGAT | | ACTGCCTGAGGACAGGCAGAGCTTGAAACCACCGAGCGT | |
| | | TACCTGGAGCTCTAAACCTAAAGTTTAACCAGCATTCAG | | AAGGAGCTGTGAGTTAAGGTATCTGTCGCTGAGTATTAG | |
| | | TGTGTGCCCATGAT | | CTATGCTGTGGATGAC | |
| 345464 | SCAFFOLD | AGTTAAGTTTTCAGTCTTATGAAAGCAGCCTCAATGAGT | C/T | GGTGGTTGCTATTTCCAGCTCATGTTTATGAAATACATA | 117 |
| | 150213_ | GTTTCTGCCTGGCAGTCTCAGTTGCCACACTGCTTTGCC | | TAATTTTAAGGCTTTGCCAAGAGAGAGCCTTCCCTCTGT | |
| | 25683 | AAATTATAGTTTATCTGCACTGTGTTTTCTGGTCACGGG | | GGTTGATTTTCAGAGTCATAATTACCCTCTTATTACAAG | |
| | | CTTCAGCTGAGCAGGACGAGACTCTGAGGACTGAGACCC | | TCAGTGTTCTGGGCCCTGACTCCCCTGGGTTCTTGTGGC | |
| | | ACATATTCAGACCATGGGTGCTCCCTGGGCTGCTGCCGA | | CGGCTCGTGGGACAGACAGAGGTATAACACTGGTCAAAT | |
| | | CCCACTGGGTCTGGAAGCACAGGGGTCACAGTGGGACTA | | CTGCTGACCACGCTGTTCCGAGCTAGCAGACTCGGCAGC | |
| | | GGCTAGTTCTTTTCCA | | CTTGTCAAGGGTTTGA | |
| 352784 | SCAFFOLD | TGCTTCCATGTATTGTGATAATGCTGCTATGAACATAAG | T/A | AAAATAGTAGCCATCGTATATGTTCATGTATAACTGATT | 118 |
| | 260109_ | TATACAAATATATCTTTGAGAACCAGCTTTTAGTTGTTT | | CACTTTGCTGTACAGAAGAAAGTAACACAACATTTTAAA | |
| | 14985 | GTAATATATACCCAGAACTGGGATTACTGAATCACAAGT | | TCAACTATACTCCAACAAAAATTAAAAACAACAAAAAAA | |
| | | TAATTATAATTTTATTTTTTTTAACTCTGATATTGTTTC | | CAGTGGCCATCCTAATGGGAATAGCTTTGATTTGCATTT | |
| | | ATAGCTGCTGTAGCATTGTACCTTCCCACCAATGATGCA | | TTCTAATGTTAAACATCTTTTCACATGCTTAGCCATTTT | |
| | | CAAGGGTTCCAATCTCTCCACATTCTCATCAACACTTAT | | TATATCTTTTTTAGAGAAATGCCTATCTAATTCCTTTGA | |
| | | TTTCTCTCTTTTTT | | CCATTTTTAAATTGCA | |
| 346642 | SCAFFOLD | TGCCTATGTGGCTCATATCTGTGGCTTCTGTTTTATTTC | C/A | TTGGTGATGAGGGCTGTAATGGCGGAACATGAACAGGTG | 119 |
| | 251761_ | CAGTGGGTGGTGCTGGTCTAAGAGGTAAGGAGCCAGATA | | GGGGCGCTCAAGAGAAAGCGGTCACGCCGCCCCATAAGG | |
| | 4653 | ATAACAATCACGTGTGTAGCATGCTCTACCCATGCTCTA | | CGAAGCAAACCGTCCAGATGGAGATGACTGATGCTTAGG | |
| | | CACCGGACCCAAGTCATTTTATTCAACCCTCATAGTAAA | | CTGAGTGAGCCTGGAATAAAGACATCCACGTAGCCAACA | |
| | | CTCATGCAGTGGGGGTCATTATCCCTATTACAGATAAGG | | AGCAGAAGGGGTTTCCTGAGCAGAGGAAGAGCAGGTGTG | |
| | | CAGTGACCCACGAGTGAAACCACCGGCCCAAAGTCTCAA | | AAGTCTCAGAAGCATGAAACTGCATGAAGTGTCCAGGGA | |
| | | AGTGAACAAAGTCCCC | | ATGGCCGAGGAGGAGA | |
| 343918 | SCAFFOLD | CTTTCAGCCAAAATATCAATGAAGATACTACGTGACTGA | A/G | GCCAGACCAGTGAAAGGAGACTTGGAACGCAGCTCTGCT | 120 |
| | 144174_ | GGTTGAAGGTCTGGATATTATCATTCTTTTTATGAAACA | | CTGTTTTCTCAGCCAAGTAGCCTTGCAAAGCAAGTCACA | |
| | 3812 | GATTAACTATGTTTCTAATAACATAATTTTAATAACAAA | | TGACCTCCCTAGGCTTCAGTATCCAGATGTACAAAATGG | |
| | | CTGATTAAATAGTATTAGAAGATTCATAGTTCTAGCACA | | TGATAAGATCAGCATGCCTCCATGCCTCAGCTTGTTGTG | |
| | | GAAATGCATACCTGTCAAAATGCTGCACTGTCACTTTTA | | AGAAGCACTGGCAGGGGAGGCTGAAGGGAAAGACAGCAG | |
| | | AGCCTAGTTTATTTTCATACATGTGTATAAAACAGTGCA | | ATATGGAGAAACCTGGGCACTGGGCCCCTCTGAAGGTAC | |
| | | GTGTGATGGAAAGAC | | TCCCCCGTGCCCTGAA | |
| 346964 | SCAFFOLD | TTTTAAAACCAGAACAGACCACTCAGAAAAGGTAAAAGT | A/G | TACAAGCTTCTTTGGCTTAAAAAAAAGTTGCTGTTAATC | 121 |
| | 7023_ | ATAAGAGAGAATTTACAGAAAGTGAAAAACCCCTACGTG | | TGATTTTGGATTGCTGAGTTGATTACTGGAGAGGAGATA | |
| | 4778 | ATTGTTGAAATAAATGTGACAGTGGAACTGATGATGCAA | | GGAATTTTTCCTAAGGAAGAAAGAATTACCTAAGAGGAA | |
| | | AATGCAAAATTCTCATTTCTCCAAACCTTCTTCATATTA | | AGCTCAACTCTTTCCTTTTTGAGGCTCAATCTTATAAAC | |
| | | TGGACTAGACAAGTCTTTCTGGGGCAAATATTTATTTTG | | ACCACTCTGACAGACCAGATCTTTGAAAAGTCCAGTGAC | |
| | | AAAAGTGCCACTTGAACAGACAAAATTAACTTATTACCC | | ATAAAGGTCTCCAATGTCCCCAGGGAGGAACTCACTGTG | |
| | | AGGTGAAAAAGGACA | | GGAGAAGGTAGAATTG | |
| 342614 | SCAFFOLD | ATTTTTGGAGGGTAAGGACCCCGGTTTGTACCTTGACAT | T/C | GCAGAGGAAGGACTGCTCCCACAGACAGTGACAGTGGAA | 122 |
| | 371850_ | AATAAATGCACAAAGTTTTGTGCATATTTCTTACACAAA | | AGTGGCCCAGCCAGTGGGAATAGCTGGGGCATCTTGTTT | |
| | 156 | GCTTTTGCCTCTGCTGGTTGACTGACCATGTGCTGTACT | | GAGGCTGTCTGACTGGCTCCTTGTCATAACCCCAAGTTG | |
| | | AAAGATGACCTGCTTGGGGAAAGGATGCCACAGCATGA | | AAGGACTCTCCACTTTGACTCATCAAAGCCTGGAAATTT | |
| | | | | TTCTCAACTAGATCTGTGGTTGTGAAGATTTCCTGCCAC | |
| | | | | TACCTGTCTGAAAGATTCTCTCCTCATTTTTCATATTCA | |
| | | | | AGGATATGTCTCTATG | |
| 347425 | SCAFFOLD | TCTGCTCAGGGGCCCCACGACTTGATGAGCAGAGTGGAG | G/A | CTCCACATCTGGAGTCTTGCCGCAGCCCACAAAGCTCTC | 123 |
| | 216862_ | ATGGAGGAGGACTCGGGGCACGGCAGCGCATCTGCCGGC | | ATCCCCAAATGCAAAGCGTTTTACAAAAGAAGGGATTCC | |
| | 6835 | TCCGAGGAGGCATCCAGCACCCCCGAGACAAGCAGTCAC | | TTTAAATCCCAGTGTCCTTGCAGAGTCGGTGAAAGCCCA | |
| | | CCCAGCACTGACCGGGTGGCAAGCTCCCCCGAAGACAAA | | GAGTGCGTCAGCTACAGTGGATGTAGCTGTGAAAATTAA | |
| | | TTTTCCCAAGAAAATATGGAGTCTCGGGAAAAGTTACCT | | CAAGAAAATAGTGCCCCTTGATTTTTCCATGAGTTCTTT | |
| | | GAAACTGACCATCGTCTCTCAGGCACAAAGTGCCATTTA | | AGCCAAACGAATAAAGCAGTTGTGTCAGCAAGAACAGCA | |
| | | AACCAAGAAGAAAGCA | | ACAAGAAAGTCAACAG | |
| 352451 | SCAFFOLD | ATCCCATATGTCTTGAAGCAACTAAGGCTATACATCACA | T/C | AAACAAATATTCAAAAAAAAAAAAAAACACAAAAAAGTA | 124 |
| | 718_ | ACTACTGAGCATGTGCTGTAGAGCCTTCCTGCCTTAACT | | GATAAAGGAGAATAGTCATTTATTTATTTATTTGGATAG | |
| | 5757 | ACTTAACTACTGAGCCCATGCATTGCAACTACTGAAGCC | | ATTAAATAAGCTAATGTATTGGAGATATACTACTAGAAA | |
| | | CACACCTAGAGCCTGTGCTCCGCAGTAAGAGGAGCCACC | | GGTTACTAAAATTTGCCAAAATACTATTCAATGTTTGCT | |
| | | AGAATAAGAGGCCCGTGCACCACAGGAAGGTAGCCTCCA | | GTGTTGACTGAAGAGGCTAAGCAGCATTAAAAAACAAAC | |
| | | CTTGCCACAACTAGAGAAAGCCTGTGTGTAGCAACAACT | | AAAGCTTCAATACAGTTGACAATTAAGCATTTACCTTGA | |
| | | TACCACAGCCCCCAAA | | GAAACTAGTGGAATTT | |
| 344675 | SCAFFOLD | TGACTCATTGGAAAAGACCCGGATGCTGGGAAAGATTGA | A/G | TAATCTCCAGCATCCCCCACTTCTCCATAGTCAAGCTGA | 125 |
| | 155700_ | AGGCAGGAGGAGAAGGGGATGACAGAGGATGAGATGGTT | | TTTTCCTGGGGCTGCAGACCTTGGGCCAGGTTGGTGGGA | |
| | 8753 | GGTTGGCACCACTGACTCGATGGACATGAGTTTGAGAAA | | GTGGTAGTTCTACCTCTAGATGTCTCACGGCTTCCATTT | |
| | | ATTCTGGGAAATGGTGAAGGACACGGGGAAGCTGATGTT | | TCTCTCCTATAAAATGCAAAGATTGGTTAAATGATCTGT | |
| | | CTGCAATCCATTGGGTCACGAAGAGTCAGACACGACTGA | | AAATTCCCTCCAGGTTCAAAATTTTGATTCTGATTTGTC | |
| | | GCAACTAAACTAAACTGATCTGAACTACTGAAGACGCCG | | ATCTTTGGCATCAGGATAGCTCTGCCATTTAAATAGAGC | |
| | | TATGTCATCCATGTTC | | CCTTTTAATTAGTGCA | |
| 344550 | SCAFFOLD | CATCACTTCCATTAGCAATGAGGAGACTAGGCTGGGGTT | C/T | GCCTGGCACATACTACCTCGAGTACGTTGAAGCCCTTAG | 126 |
| | 10204_ | AACCAATGGGTGTGTTTTCAGAAAAGGTATCAGAACCAG | | CTGGTAGTATGAGAAAAAGTACAAGAAATATTTATTGAT | |
| | 22479 | GATTGAAGCAGTCTGCTCTCACTCTATACACTGCATGCT | | GACCTACAAGCTAGGTGATAGAAGAGGATGGGCATAGCT | |
| | | TTACATGTGGAAAAGAACAAGTGTACCTCGGGAGAGGCT | | GATACAGATTATGGATACAAAGAACTTACTCAGGCTTAA | |
| | | CCAGAATGAGAAGACACACTGCAAGCAAGTCGCCTGAGC | | AAGCCAGATGTAAAACCAACTTAACTATTTAATCATCTT | |
| | | ACAGTATAGGAATCTGCTGTTCTCCTGTGGAAGAAAGAA | | CCATCTCCCGCACTGAACTCCCTTAGGCCAGGAGGATGT | |
| | | TGAAGGCATTGCAAT | | TACACGGAAAATGAGT | |
| 346191 | IBISS4 | AGCAGGAAGACCTGCGTTTAATCGGGGGTGGGGGTGGGA | A/G | TATGGACTGTTCTTCCTGGGCCAATTGCCACGGAGGACT | 127 |
| | snp482 | GTCAGTTTGGA | | GTCATTGACGA | |
| 344923 | SCAFFOLD | GTGTGTAGCATGCTCTACCCATGCTCTACACCGGACCCA | C/A | GTCCAGATGGAGATGACTGATGCTTAGGCTGAGTGAGCC | 128 |
| | 251761_ | AGTCATTTTATTCAACCCTCATAGTAAACTCATGCAGTG | | TGGAATAAAGACATCCACGTAGCCAACAAGCAGAAGGGG | |
| | 4564 | GGGGTCATTATCCCTATTACAGATAAGGCAGTGACCCAC | | TTTCCTGAGCAGAGGAAGAGCAGGTGTGAAGTCTCAGAA | |
| | | GAGTGAAACCACCGGCCCAAAGTCTCAAAGTGAACAAAG | | GCATGAAACTGCATGAAGTGTCCAGGGAATGGCCGAGGA | |
| | | TCCCCCTTGGTGATGAGGGCTGTAATGGCGGAACATGAA | | GGAGACAGCTTGAGCTCCAGGAGCAAGTGGAGAGAGATG | |
| | | CAGGTGGGGGCGCTCAAGAGAAAGCGGTCACGCCGCCCC | | AGTCGGCAGAGATAAGCAGGAGCTTTGCAGGGAGAGGCC | |
| | | ATAAGGCGAAGCAAAC | | TGCATGCCACACACAG | |
| 353129 | SCAFFOLD | TTCCTAGGCCTATAACTCACCAAAAATTTTAACCTAGAA | G/A | CAGATATTCAATTAGTATTTGTTAAAAATAATTCATTAA | 129 |
| | 170246_ | TTTACTATCATTGTTCAACTTAGCAATAAGTGGTCAGAA | | AATTAAATTCATTACTTTTCTTAATACTGATTCCCAATT | |
| | 10598 | AGGCAAAGTGGCAGTCATACAAGTGAGTCTGTGTAAATG | | AAGTTGTTTCGGAATTCTGTTCTTAATTCTTTTCTTGAA | |
| | | TTTGCGACATCGTAATTGTCTGTGCCAATTGAGAATCAG | | GTGGGTCTCCTTGCAAGGAATAAAGAAAGACAGAAACAG | |
| | | GCAAAGAATTCATCCCCATCCTTTTACAGATATCGTTCT | | TGTGAGCACATTATAGCTAAGGCTTCCCAAGTGTTGCTA | |
| | | TAAAAACAGAAAGTGTAATATGCTGAACATTTCCTATCA | | GAGGTAAAGAACCCGCCTGCCTAGGCTGGAGACATAAGA | |
| | | CATTTCCCATCACACT | | GATGAGGGTTCGATCC | |
| 350612 | SCAFFOLD | TTGTTCAAGGGACAACTGTGATACAATTCCAACCCCCAA | A/G | TGTGGCATTACATTGTGGATATTCCACAACTTTTATATT | 130 |
| | 100457_ | AATTCCCTCTCCCTCTTTCCTATCAATTCGTAATCCAAT | | CATTTACCAGTGGGTTCCAGTTTGGAGCTTTATGAATAA | |
| | 11884 | CCCTGGTAACCTGGAACTGATTTCTGCCCTTATACTTTT | | ATCTGATATTAATGTTTACATACTGGTCTTCATGGTTGA | |
| | | CCTTTTTCAGAATATCATATACATGGAATCATATAGTAT | | GCCACTTTTGATGTTTTGATTTTTTTTTTTTCCCCCTAA | |
| | | ACAACAGTCTTTTGTGCTGGATTTGATGTTAAGCTTTGG | | CTTCACAGTTAATGTCCCAAGCAGTGGAACATTAGTGGT | |
| | | GGCCTCAGTCTTGCTATTACTGATATCAGCAGATTTTTC | | CTTGCAAGTCCCTGGGGGTATAGGAGGTCTTAGGAATTG | |
| | | TTTTAACTGCTATCC | | AGGACGTTCAGCTCAA | |
| 342958 | SCAFFOLD | GGCCTAGACTTGTAAGAGAAAACTGGGTGGTCAGCACCT | C/T | GCCACCGGCAAATCTCAGAAGAAACTCCTGTCTGCACAG | 131 |
| | 221402_ | GTTTCACTGTTGCTTCTGCCTTCCCTAGATATGTGCAGG | | CCCGCGGTCAACAAAGACCTTGGCACAGCTGCAAAGTCC | |
| | 10840 | TGAAATTTGTCTGTATTCGGACCCAGTCAAACAGGAAGA | | CCAGTTGAACCATTGTTTTGCTTAGACGAGGTCCAGATA | |
| | | GAGCAGCAGAAGCAGACATGTGCCCAGCATACTTGCTCC | | CCCGCCAAGCCAGAGCAGGAGGACATCGCTCCTTCTGAC | |
| | | TGCGGTACAATGAGAAACTGGATAGACTGTTCATCAGTG | | CTGGCCAAGATAGCCAAAGTGATGAAGAACTTTCTTAAG | |
| | | AACTCAACACACAGCATATACACACTGACCCCAAAACCA | | GTAGATGTGGGTTCCATGGCCTCCTTCAGTGTGGGCAGC | |
| | | CTGGTCCTAGAGGAGA | | AGCCAAGACCTGGACC | |
| 348684 | SCAFFOLD | TTAAAATAAGTAGTCATTTATACAAAATACTCATTTTGT | T/A | AGATGAACCCCATTGCCCAAATTCATGAAAAGAAAAAGT | 132 |
| | 35063_ | TAATTTTGTCCCTGATAGTATCCACAGAAAAGTATGTTA | | TAGACATGTCATGAATGCATAAAACATATGTAGATACAG | |
| | 18919 | TTGGTATAATTAAAAATGAAATAGCACAGCTATACTAAA | | GTCTACTTTACCATTTACTACCATAAAGTATATACAAAT | |
| | | TAATTACACACATACACATAGCTACCCTTGAATAACATG | | CTATTGTAAGAAGTTAGAATTTATTAAAGCTTATGCACA | |
| | | AGTTTGAATTGCATGGGTCCACTAATATGCAGATTTTTT | | CACAGAGACTTTGGGAAATCCTACATACATGGCATCATT | |
| | | TCAATAAATGTATTGGGACATTTTTTAAGGATCTTCTAC | | CCCTGTTAACAGAAATGTAAATAAATGTAAAGATGCAGT | |
| | | ATCTGAAAAAACTTAA | | TTTAAATTATAACTGC | |
| 349112 | SCAFFOLD | CACTCTCTGTCTCAGGTAACCACAAATCTGACCTGTTTT | C/T | AACCGTGTACCTGTTAATCTTCCTCACCTGTTTCTCTCA | 133 |
| | 171377_ | TTTTCCATGAGTTTGTTTTTGAAGTTTAATTTGACCCAC | | TCCCCCAGCCAGCAACCACTTGTTAGTTTTCTTCATCTG | |
| | 3418 | ACAAAACTATATTTAGTTCTGGGTGCATAGCATTGTGAT | | TCATTCTTTTTTATGTTCATTTGTTCTGTTTTTTAGATA | |
| | | TTTATATTTTTATACATTTCAAAATGATCACAATAAGTC | | ACACACGTAAATGAAATAGTATGGTATTTGTCTTTGATT | |
| | | TAGCTACCACCTGTCACCATACAAAGGTATTGCATGATT | | TATTTCACTTAGGTCCTTCCATATTGTTGTTGCACATGG | |
| | | ATTGACTATATTCAACATGCTATATATTTCATACCTGTG | | CAAAGTTTTTTCTTTTTTTTATGGCTGAGTAATACACCT | |
| | | ACTGATTCTGTTTTTA | | GTGTGTGTGTGTACACA | |
| 346975 | SCAFFOLD | AGACCATAAAAACTCAAGAAATGCTTGAATGTTTGTACT | G/A | CCCCACATTTAAACACCGAAATGTATATAGAATGAGATT | 134 |
| | 721_ | TTGTTAGTGCTTTAAGGTAATTTAAAGCAGAGAGATTTT | | ACTGTCTATAGAATGGAAAAGCACATGGCTCACCTCAGA | |
| | 3754 | TGTATCTGGAGCTTTGTGTTCTCAACTCATGATTTAAAA | | CTGTGGTGACTCCCCCTATGTGGCCCAGTCAAGGCGAGC | |
| | | GGTTCTCAAAGGCAGAAATTTTAAAAAAATAATCATCTT | | ACTCCCCATGTATTCCAGTGCCATCTGCTGAAGCCCTCC | |
| | | GAAGCCAAAATGTCAGTTATAACACACATGAACATCAGT | | CTCTCCCCAGCACAGCTGAGCAAGTGAACCAAAAGAAGT | |
| | | GGAATCAGCAATAGACCGCCTATGCTGCCCCACATTTCT | | GGCTACTTTCACTACCTTCTGTCTGGGTGGTGAACAGAG | |
| | | GAACTGAACTGATGCT | | GTGGCAGAGAGACTTA | |
| 345781 | SCAFFOLD | ACTGCTGGGTCATTTTTGTTATGGTAATGAATGCATTTA | G/A | TTGAAGAGTGTATCCAGCTCTGAAAACAAGATGCAAGGA | 135 |
| | 255186_ | GTCCTCAAATTGAAAAAAAAATGTATACTGCTTCTTTTT | | AATGCAGTCCTCATTTTCTCCAGCAGTTAGTTGCTCAAA | |
| | 3403 | ATAATAAGATTTATTTTTATTATGTAGTCCTTTGTTAAT | | GGACTATAGCCATTTCAAGAGGTGCTAGACGTGCATGCA | |
| | | CTTAACTGGGAGATGGTTTTCTTCAAATATTATTGGATC | | TAAGGCTTGATCATGCTAACAATGAAGAAGTATAATGAG | |
| | | CACATTTAGAAGGGCCTGCTTTACAAAGTACGGGCTGAT | | CATTTATGGTTTGAAGAGTTTCAAAAGGATGCAAATCAG | |
| | | AATGTTTTCCAATCAACAAAGCCCTTGAAACTGTTCAGC | | TATCCTATCTACAAGGATAAAAATATCCCATGAAGTTAA | |
| | | TTGTTAGACATCTGCT | | AGAGCAGTTTGTAGAT | |
| 347075 | IBISS4 | GGCTTTCTGAGCAAGAACCTCCTGACAGGACTGAGTAGG | G/T | TTGTTTACAGTACTGGAGAGAAATCCAAGATTGAGGATG | 136 |
| | snp589 | GGTCTAGATGG | | AGTCCAAGTCA | |
| 349265 | SCAFFOLD | CCTTTCATCTTTCTTAAAGTGTCAAGAGCTTTCAGATAC | C/T | GTGTTGACACATGCTGAGCTTGTCATAGTCAGCAAAGAC | 137 |
| | 221810_ | CTCACTGTTCTGAATACTGCTCTGTCAATATTTATTTTA | | ACAAAAATTTTCTATTCAAAGGTGCTATCATATCATTTG | |
| | 557 | TAATATTTATAGTGTATAGTGTTAGAGAAATTATTTCAA | | ATTGTTTTATCCTAACTAGTAAAGGTGGAAACTGGCATT | |
| | | GTGTGAACTGCATAGTAGTTCCTGACGTGAGATTTTGAA | | TGTTCCTTTTAAATTGCATAATATTGATTTAGTTCTCTT | |
| | | AAACACAATGGATAATTTTATTATCTGGACATGAGTCTT | | GTTTTTAAAACAATGATTTGAAATGTTATAGACACTGAA | |
| | | TGATAAACATAATGTATTACCATGTCATGCTAATATTTT | | TCTGAGGGGAAAAAAGAACAATTTTTATATTCAATTCAG | |
| | | CAGAGGTATGATCAG | | TTTAGTTCAGTCGCT | |
| 350926 | SCAFFOLD | CTGGAGTCTTAGGAAATGCAAGTAAATAAATTACTGCCT | A/T | GGAGACTATACACCAGGAGAATGCATCTGACACTCACTG | 138 |
| | 240809_ | ATATTTCTGTCACAAATGGCAGCCAAGCTCTTTATCTCT | | ATGTTTGATCCTCTCTAAGTTAAAATCCTGGAAACAATA | |
| | 7016 | GAATTTGCTCCCTTCTCTTTGTAGGTCAAAAGGAGTCCC | | TTCCAAAAGAGATCTTTGCTATGAGTAATATCATCATTA | |
| | | CAGAACACTAACAGCAATCTTGTTACTACTTCATGAATA | | ACAGTGAGGTACATGGAGCTTATTTTGAAGCTATAAAAG | |
| | | CAGATGATGTTCATTTCCTGAGATTGCCAATCTTTACTC | | AGGATGACAAAAAGCATATATATATGGAAACTTGGAGCC | |
| | | CAAAACCCTAGATCCTGACAAAATCAATTACACTTTCAA | | AGAGAAAATCAGATGGTTTTTAACAAGCTATAGCAGAAG | |
| | | AATGTATTACTCAATC | | AAAGACCACATTTTTG | |
| 343949 | SCAFFOLD | CTTTATCCCAGTGGTCAAAACCACTGCATGACCTTTATC | C/T | GATGGCACCAGACACACGGGGTCAAGGGCAGGTGGACAG | 139 |
| | 155700_ | CTTCACTGCTCTAGATGCCTTTAGCACTGTTGAGCCCTC | | AGAAGGGGCTCAGAAAAGCTGGTGATGCTCTTATTCCTG | |
| | 12715 | CTGATGAACACTGACGACTCCCTCATTCTCCATGAAGCA | | ACTTGAAAACCCTCAGTGCTCTGGATCTGGAGGAGTCAA | |
| | | AGATGTCCTGGTTCTCTTGGTGACTCTGTGAGACTGCTC | | GTGGCTGAGGGATCTTTTTTAGCACTTAGTTTTTTCAAG | |
| | | ACTTGCAGTCTCCTCCACAGTCAGCTGTCACTAGCCCAT | | TCTCACCCAACTGTGGGGTGAAGGTGGGAAGGAGTCGGC | |
| | | TACCTGGACTAACACCATATGAAGATACAGAACATCTGG | | CACGTGTGTAACTTGTGCAAGAGGGAGGCCAAACGCAGC | |
| | | CTGTTTCTACTTCCTG | | ACTCAATTGTT | |
| 345458 | SCAFFOLD | TATTAGAATAATTATTTATTGGACACATTTTGGGCTTCC | A/G | GACGTATTTTGGGGGCAGAATCACAATAAATGTCTAGTT | 140 |
| | 145703_ | CAGGTGGCAACAGTGGTAAAGAACCCTCCTGCCAAAGCA | | CAACTCTCAGGCAAGAATAATGTACATCCAGTTTCAAAC | |
| | 5662 | GGAGACAAAAAAGAAGTGGGTTTGATCCCTGGGTCGGGA | | ATTACATGAAAGAGACTTCACAGCTTTCCCCTAAATGCA | |
| | | AGATTACCGGGAGGAGGACATGGCAACCCACTCCAGTAT | | TTTGAAGATAATTTTCTTGTTGTTTAAATTCATGAACTG | |
| | | TCTTGCCTAAAGAATCACATGGATAGAGGAGCCTGGCGG | | TAACAGTCACCTATTGAAGAAGAATGAACTAGATCAACT | |
| | | GCTAAAGTCCACAGGGTTGCAGAGTCAGACATGACTGAA | | GTATAGATGCGTATCATTCAGATGTTCAGAAAAATATAT | |
| | | GTGACTTAGAATGCAC | | TTGTACTAGAGTTT | |
| 345916 | SCAFFOLD | AGGAGTGGGGATACTCTGAGAGGAGGGTCAGCAAAACAG | C/A | GGAGCCCTGAGAATCCTGTCCATACATTTAACATCCAGC | 141 |
| | 305144_ | ACCCACCCATGATGGACACAGGGCACCCGAGGTCCTCGG | | GGCTCTCCTAAGATGCTCAGTAGGAATTGATCTTGGACT | |
| | 27244 | GACCAGGGGATGTGAGGGGGAGGTCAGGGGTCCACCGGA | | CTTGGCTCCTTAGAGCACCATCTGTCCTTTAAATCTTGT | |
| | | GGGGCACTAGCGACCGTGCAGGCCTCCCTGGAACAGTGA | | GACCCGATCTCCCATTTTTAAAGGACTGTCACAGATCTT | |
| | | GTCAGGGCATCTGTTAGGTCACAGATGACCTAGTGAGGC | | TTGCACGTTTTTGTTGGGCCTTGCTTTGTCCCCTCGTCC | |
| | | TACAGAGTCTGAGGATTCCTGGGTTACTTCCTCTCTATC | | AGAAACACAACAGGCTTCTGTTGTAAGGGCTCCACTCTT | |
| | | AAGGACTTGTTTACCG | | CTGCCCACCATCTAC | |
| 346166 | IBISS4 | GGAAGCATTCCTGGCAAAAATGCAGCTGAGTATGAGGTG | T/C | GAGCCTGGGCTGCTTTTTGAGA | 142 |
| | snp588 | ATCATTGTGAT | | | |
| 346330 | SCAFFOLD | AGACAAATGCAGGGTCTCGTGTCAAAAGAGCTGTCTGGA | G/A | CATTTCTGGGCAACTGATTTTCAGCATAGGTGCTGAGAC | 143 |
| | 145105_ | GCCCAAGACATCGCACACATCTGCCTTAAAGGCTTAGAG | | ATTTCAGTAGGGGAAAGAACAGTCTTTTTCAACAAATGG | |
| | 9149 | TGGGTGCAGAAGACACATTAAGCTCCCCTGTGTGTGGGC | | TGCTGGGATAAGTGAATAGTTCCACGCAAAAGAATGAAG | |
| | | TCATGGAAACAAGGATTTCAGATCTCAAGTTTTCATCTG | | TTGGACCCCTATCTCACACCACATAAAAAAAAAAATTAA | |
| | | ACTGCCTTCTAGGTGAGCTCTGCTCTTATTATACCATCA | | CCCCAGGGGATTTCCCTGTTGGTCCAGTGGTAAAGAATC | |
| | | TGACCCCAAACAACATTTTAAAGCATTCTAGTCAAGAAG | | CGCCTTGCAATGCAGGGAACATGGGTTCAACCCTTGGCT | |
| | | AGGTGACCAACCCAC | | GGGGAACTAAGATCCCA | |
| 353072 | SCAFFOLD | TATTGCCTTGGAGAAGCACCCAGTGGCAATTACGCTTTG | G/A | TCATACAATATTGATCTTTTTATTGTAACTATAATTTTC | 144 |
| | 131294_ | AGATGAGATTTACGGTTATAACCCATAGCAGATCTAACC | | TGAGGGCTGTGAGTAAATAGATTTTTTTTTTGTCACAAT | |
| | 7825 | TTTGGAAGAGACAGGGAATGACAGCTGGGACAGACAGCT | | TATAGTAATCCACTTGAAGCTTACTGTTGCCGTTCAATG | |
| | | TGGGTACGGTCAGAGCAGTGGTCGGTGTTCTCGCCACGA | | ATAGTGGCAAGCGTTTATTTTTTTAATAATAATTCTCAC | |
| | | CTCCAGCATTATAGCCAACACCGGCTGGATGGACTTCCA | | ATGGTTTCCCTTCCAGATTTTACACATAGTAAATGAAAA | |
| | | GTGTGAGTGTCACGAAGCCAGAATTAAATGGCATGTTAT | | AGTAAGCCCACTGAATTGCCTGTGTCTTTTGCTGGCATT | |
| | | ACTTATGTCCCAAGC | | TAGGATAAAGAGAAAT | |
| 350500 | SCAFFOLD | TTTCGCAAAGAGAGGGCTGTGTTGGCAGATGCAGAGACC | A/G | TCTCCCACCACTGAACACTGCTCCACCTGGGAGCAGCCA | 145 |
| | 70668_ | AGCTCCCCAGATGGAATAATCTTTTTCTTATTAATTTGC | | TTGCTCTGGTGTTTTTTAGGAAACGACAGTCTAGATGGT | |
| | 8488 | TGTATGTTGCTTCTCATTTCTCACAGTCACTCCAAATGT | | TTGAGTGATGTTTTCAGGGCCCTGGAAAGAGGTCGAGGT | |
| | | GTTACAAACGACTACATGCTCTGGGTCCTGAATCCACTA | | GTGGCTGGGATTGAAACTCACAGTTCCAACTTCTTGGGC | |
| | | TTGCTATAGCTTTGGGAAAAAAAAATATTGACTGTCAAC | | TGTGGAGTCTTCCTATTGTCTAGCATATGAAGCAGGCTG | |
| | | TGCAGTGAGCTTTCCCAGCACTTTTTTCGTGCTCGATTT | | TTTACTCCCTTCAGGCAAGGGATTCATGAGCATTGCCTG | |
| | | TTAAATTAACATTACC | | GAGAGCTTGTTAAAAA | |
| 344038 | SCAFFOLD | AGCAACTCAAACTAAAATAGGTCAAAAGCAGGAAAAGCT | G/A | GGCAACACCCCAATGCCCTGGCTTCTTCTGCATCCCAGC | 146 |
| | 200024_ | GAAGGCTTTCCCTAAATCACACAGAACTCAAAGCACCTA | | TGGTTTCCCTTTCTGACTTCCCCTTGGTATGTGTGTCCC | |
| | 14061 | AAGTAATCTATGTGAAGATAAAAAGATGAGTGGCAGATG | | TTTCTCTGACTGTTGTCAGAGGGATGGGTATTTTCCTGT | |
| | | GCATCACTCTGCCAGAGATGGGAAGTTAAAATAAATAGC | | GTTCATTATTTCCAGAGCAGACAGATTTGCATTAGCCTC | |
| | | AACCAAATACCAAAAACATGAATAGACAGAAAAACTCCC | | ATGTACTTCTAAGCATTGGTGTCAGCAGCTTCTTGTGCT | |
| | | ATCCAGATGTCGGTGTATTTGAAGCACAGAGAAAGTGGA | | CCAGATCACATCCTCACGACCCGCATTTTTTACAGCAAC | |
| | | ATTTGGTCCTAGGCAA | | CAGCTTGGTGAAGGTG | |
| 349617 | SCAFFOLD | AAGATATCTCACAACTGATGATGCACATCTTGTGATTGA | C/G | AAACTGAAATGCTCATCAGGCCTCTCCCTGGTCCCTTCA | 147 |
| | 50212_ | CAGACTGTGGGTGTTGGTCCTGCCCTCTGTAGTGTTACC | | GTTTGGTTTGCAAGGCCCTCCGTGATAGGATGCCAGCTT | |
| | 11110 | TTGGAAAAGTATGTGTGACAGTCACCAAGCACCACCAGC | | AGTATCTGGCCTCATCTCCCTCCCCTGACTTCCATTCCA | |
| | | ATCCACGGTCAGGCACCAGCTGCCCACTCAGTACCTCTC | | TATCTTTGATGGGCTATTCCTTCTCATGCCTGTAAGCTG | |
| | | AAATGGAAGCAGTGGAGGAATGGGTTCTCCAAGGAGTTG | | CCACATGTGTCAATCCTTACATAGGGATTTCTACATTTC | |
| | | TCCACCCAGTCTCTCTTTCTCCAATATTGCACCCATCCA | | TACATAGCACATTTTCTACTTTTTTTTTTTCACCTGAAA | |
| | | ATCTATCCAATTCTTT | | ACTCTTATCTATCCCT | |
| 351664 | SCAFFOLD | GAATGCTTCCTTTTAGCCTTTGCGATAATCCTACTTAAG | C/T | AACAGTTGTTTTAAGAACAAAGCTAGTTACTTGAGCTAT | 148 |
| | 266321_ | TGCATACTGTTATCAGTCCCATTGTATAGCTGAAGGAAC | | CTGTATGATTATTCCATGACTGAGGACATAAATTCACAT | |
| | 6651 | TGATTCTCAGCAAGGCTCTTAAAGTAGCTTGCATAAGGT | | TTTAGAAAGTGTGGCTGCATATATTCTTTATTAATCAAC | |
| | | TTCACATTTCAGAAGTTATGGAGCAGTTCATGAGTCATC | | TTGCAGAAGAATTACCAACCTGAAAAAGTTAATTGTAGA | |
| | | TGATGGAGCCAGTGCCTTTGATCTCACATTCTCAGCTCA | | GGTTAATATCTTCCTCTGAAGTTTGCAATAAGGAGTTCA | |
| | | CTTATCTTAGAAGAATTAAGGTGGATTTAGACTCAACAC | | TGATCTGAGCCACAGTCAGTTCCTGGTCTTGTTTTGCTG | |
| | | TTGTTTCTTTAAGATG | | ACTGTATAGAGCTTC | |
| 346539 | SCAFFOLD | CGATTCCCAATTTCTAGAGTCTGGCTTATCGGTCTATAA | C/G | ATTCTATCCATGGAGTTTTCCTGCTACTTAGTGAATCTT | 149 |
| | 210756_ | AACAGGGAGTTTAGATTCTAACATGAGGGCCATTTCCTT | | CCTTGTTACCATGTTATTGATTCCCCCCACCCCCAGGAG | |
| | 13983 | CGTAGGTGGGACTGGTCAGAGGTTAGCATGAGAAGACTG | | ATAGCTGTACTATATTGCATAATAATAAGATGACTATTT | |
| | | CTGAGACCTGCCCGCCAGGACATCCAGGGCACCTCACTT | | AGTGTTAGCTCAGGGCCTCTAATGAAGCAGGCGTCAAGA | |
| | | GAGAGCCCTGCCTTGGGAAGTGCTTCTCCATCTGTATTA | | TGGAACTAGGCATGGAGGGATTTATTGGTTGACCTTCCT | |
| | | GCATCATAGCATCTTTCCATCTGCATTTATGATGTGATT | | GTGGAGGACACAGGGCAGTGGGGGCAGGGGTAAGAGGGA | |
| | | CACTTCTGAGCAGCTC | | AGGCCATTCAGACATT | |
| 351855 | SCAFFOLD | TGGAGGGGAGTGTCCATCAGGTTTGGCCTGCTCAAAAAA | T/A | ACATTTATATTTTGTCCCAGTATAAGCTTATCTGCTTCT | 150 |
| | 55579_ | ATTTCATCTATGACCTCCTTGCAGTTATGATCGAGGGTT | | CTGACCAGGACCACAGTGGCAGCCAATGCCCAGAGACAT | |
| | 11155 | CCCACCTCTGTAGGTAAGTAGGTAAGTAGGTGGTGGGAT | | GGCAGCCATCCCGTGGCCACACAGTCCAGTTGTTGGACA | |
| | | TCAGTGTCCGCACAGTCTCGAGGTGGACCTGTGGGTTTT | | GGCATATGACCAGGCGCTGCTATGGTCCAACTGTTTGCA | |
| | | CACAAAGCAGTCCCTGACAGTGAGTCATCCTGGTATTGG | | TGAGGACCCCCAGTGCAGTGTGATTTTTCTCATGCACAA | |
| | | TCAGTTACTTGTGCCCTTGGCTGTTCATCAGCACAGTAA | | ATAAGTTAAAGTCCCATGTCACATCTGGCAGCCCTAATG | |
| | | CAGCATGGGGAACTTT | | CTGGAGCGTTGGTCA | |
| 353087 | SCAFFOLD | CTGCTCAGAGATTTGTGTAAAATGACAGGTGGTTTAGTA | A/T | ACAATTAAATGATAAAACTACATTTCTACATGGAGCTAT | 151 |
| | 145449_ | AGAAATTCAGCAGTATCAGGAAATTCTATAGGTGATCGG | | CATCAAGACATTCTACGAATTCCGGCAGAATATAGACTA | |
| | 8789 | TTAGCTGGAGAGCCAGCAGACACTGGTCCATGACTGGGT | | TATTTGTTATCATCAATGACCGTGGAATAAGCACCCTGT | |
| | | GAATTCATGCTTGGTAAACCACCTTAAAAATTGAAAGAG | | GGCAGGCTGACACATAACAGTAAATACTAAGAGTACGAG | |
| | | AAGAAAGAGATATTATGTATGCATGTATCTGTTTATTGT | | GAAAACGTACATAATAATGATAATAACGTGTGTACACGA | |
| | | CTATGTTTGGGTACTTATAAAGAGCATTCCCCTTCTTTA | | TAAAATGTGTGGTACAGATTTTCCTAATCCATATTGATC | |
| | | AAGAAAGCAAAGCATT | | TTCATCTGTCACATTTTG | |
| 350312 | SCAFFOLD | GTGGACACAGTATGTAATGTCTTTTTTCTTTTTATTTTT | T/C | CCAATGACATTCTTTTGTGTTACGTGACCTGGTAAAACC | 152 |
| | 295543_ | TCACTGCTCTTCAAATGCCCTTCCCTTCAATCTGTTATA | | ATGATCAAATTCACCTCCTGGCCCACCTGGCATTTCCAG | |
| | 3871 | GGTCTTCCTCAGAAGAGTCCCTTGTGCCATAAATTTTTT | | GGAGGGACTAGGATTGAATCAAGGAACAAGTTGCATTAA | |
| | | TACTTGGCTTCTTGTTAAGTCAGGACTACTCTTCACGCT | | GTCAGAAGTGTGTTCCCTTTCCATCTGCTTTGAGACAGA | |
| | | GTGCACCCATGAAATCATTGTCCTGCGGTAGACCTTCAA | | ATCCTTCAGTGATACAGAATCCTTCAATGATGTAGAATC | |
| | | AGAAGCCACATGGTCTAGCCCGAGGATCTGCCCTTGTTA | | CAAGCCTTAGAAGACGCGAGGTGGATAAGAATCGACTCG | |
| | | ATTGGGAGTTAGTCCG | | GGCCACAGCCAAGAAG | |
| 352162 | SCAFFOLD | TTTAGGTCATACCTGAATGGTCTAGTGGTTTCCCTCACT | T/C | TGAAATCCATAACCAGAGTGAAGACTTATCTGATAAATA | 153 |
| | 205195_ | TTCTTTCAATTTAAGTCTGAATTTGGCAATAAGGAGTTC | | TGCAAGACCCAGCTCAAGAGCAAACAGTGGGGCAAATTC | |
| | 11563 | ATGATCTGAGCCACAGTCAGCTCCCAGTTTTGTTTTTGC | | TGGCATATCATAGCCACAATAATCCTAAGAAGATCCTAG | |
| | | TGACTGTATAGAGCTTCTCCATCTTTGGCTGCAAAGAAT | | ATACACTATGGAACATAATGAACCAGCTGACCAAATACT | |
| | | ATAATCAATCTGATTTCAGTGTTGACCATCTGGTGATGT | | ACGGGTGTCAATTTGGCACTAATAATCTAAATAAATAAA | |
| | | CCATGTGTAGAGTCTTCTCTTGTTCACTATGCATAATAA | | AGATTCACACATTAGAATTTGGTATATGCTGAGAAGTAT | |
| | | ATCTGTTGTCTGAATAT | | TTATGTTGAAGCTGAA | |
| 345166 | SCAFFOLD | AGTCCAATACATATTGTTGTAAATGGCAAAATTTAATTA | T/C | GACTGAGCAACTAAGCCCATGATGAGTAGTATTCCATTG | 154 |
| | 60902_ | TTCTTTATTATGATTAGTGGGCTTCCCTGGTGGCTCAGA | | TGTATGTACACTACATCTTCTTTATCCATTCATCTGTTG | |
| | 6944 | AGGTAAAAGAATCTGCCTGCAGTGTGGGAGACCTGGGTT | | GTAGACACTTCCATATCTTGCACTTGTAAATAATGCTGC | |
| | | TGATCCCTGGGTTGGGAAGATCCCCTGGAGAAGGGCATG | | TATGAACATGGGTGGGCATGTACCTTTTTCAAATCAGTG | |
| | | GCAACCCACTCCAGTATTGTTGCCTGGAGAATCCCCATG | | TTTTTCATTGGATATGTGCCCAGGAGTGGAATTGCTGGG | |
| | | GACAGAGGAGCCTGGCAGGCTGCAGTCTATGGGGTCACA | | TCATATGATAATTCTGTTTTTAGTTTTTTATGAAACCTC | |
| | | AAGAGTCAGTCAGACA | | TATACTGTTTTCCAGAG | |
| 347646 | SCAFFOLD | TTCAGGATGGCCTGAGAAATGCTCCCACTGTTTCCATTA | G/C | AATTCACCATTTTCCCCAGATGGCCCACTACTTCCCTCC | 155 |
| | 290023_ | GAAGGTAAGATGATCAAACCGTTAGAGGGTGTGCTGGTT | | TCCAAATAGGAAGACCCAACAGGACCAAACAGGGCTTGC | |
| | 4337 | TTCTGGGCTTCATTTGCCACGGGTAGCACTAAAACCCCA | | AGTGGCCCCTGTTTCCAGAGCCAGGATTCCCAAGCCGGT | |
| | | GGTCATCACTGCTGCCTCTCTTCCAGGCTGCTCGGTGAT | | GTTGTACCTGATTGAGCAGGTGCCAGGTCTGATAGTCCT | |
| | | TTCAATGAGTAGATCAGGATTCAGGGTGCACAGCAGTTC | | CCTTGCTACAGTGTCGGCTGAAGATTGATTTGTAGTCCA | |
| | | CAAAATATCATATGCCCTTGCTCAACCTGGTGTGTGAAT | | CCTTCACCAACTGCCATTCCGAGCGGAGGCTGAAGTGGC | |
| | | TCCAATCCCACCCCCA | | CAAAAACTCTAAGTGT | |
| 354124 | SCAFFOLD | CCTGCAATGCAGGAGACCTGGGTTCAATCCCTGGATTGG | T/A | ACATAAAATTATTTTTGTCAAATTGCTTTAAAATATTGG | 156 |
| | 135419_ | AAAGATGCTCTGGAGAAGGAAATGGCAACCCACTCCTGT | | CAGGCTTCCTTTCCATTTCCATATTCACCTTTTGGCAAA | |
| | 14068 | ATTCTTGTCTGGGAAATCCCATGGATAGAGGAGCCTGGC | | CCAGTAACACATGGCTCACAGACTGGCCTGCTCTGTTAG | |
| | | AGACTAGAGTCCACAGGGTTGCACACAGTCGGACACGAC | | TCACATTTGAAAGAGTTGTAACATGGATGTGACTTTAGT | |
| | | TTAGCAACTGAACAATAACAACAAAAAATTACTAGAAAA | | ACTTTATACCAGGAAGAAATGGACTTAAATGGCCCTGAT | |
| | | AAAATTTTTAAAACATACAAATTCAAGCCTCAATTTTTA | | GAGGACCCCTGATAGAATATACTTTGATGAGGCTAAGAA | |
| | | TTATTAGAGTCAACA | | AAAAAAGAGAGAGAG | |
| 345428 | SCAFFOLD | CTTCTCATACCTATTTTTGTTTCTGGTGTTGATAGAATT | T/C | TTTTCTTCCAGGGAGCAAGCTCCTTTTAATTTCATGGCT | 157 |
| | 135007_ | GACTGGTTTGATCTCCTTGCAGTCCAAGGGACTCTCAAG | | GCA GTAACTGTCCACAGTGATTTTGGAGCCCAAGAAAA | |
| | 48819 | AGTCTACTCCAACACCACAGTTTGAAGACATCTATTCTT | | TAAAATCTGTCACTCCATTCATAGGTAGCTCCAATAGGA | |
| | | CGACCCTCAGCCTTTTTTTGTTGTCCAGCTCTCACATTT | | GAATAATTCCTTGATAAATTTACTTTTGTCTACTATTAA | |
| | | GTACATGACTACTGGAAAAACCATAGCTTTGACTACATG | | CTACATATAAGGAAAAGTTAATGGATTTATAAGACAGCT | |
| | | GACTTTGGTAGGCAAAGCAATGTCTCTGCTTTTTAGCTG | | ATTTAGTAATCAGATTTTTAAATGGTATGCTATTACATT | |
| | | TCTAGGTTTCTCATTG | | TTGAAAATATAGAAA | |
| 346083 | SCAFFOLD | AAAGATTGGTCCTCAACCCTGAGCTTCACCCACAAGAAA | T/G | GTTGAGCAGAGTTCCAACAAATGGAACTTATATTCAATA | 158 |
| | 61272_ | TTTCACCCACACTTTAATGAACTAGTCACTCTGCCCCCA | | CAGATGTCCATGTTTATTGTCAAATTGCCAAGAAAATAT | |
| | 3342 | AACACAAAATGGAATTTTATTTTATTTTTTTAACACCAA | | TCCCCATTACCCTCTTCATTAAACCAGATATTATAAATG | |
| | | AAACATTTTGTATTGGGGTATGGCTGATTAACAATGTTG | | AGGAAAGAAGAGTGTTAAGATCAGAACTGTATCGTCCAG | |
| | | TGATAGTTTCAGGCGAACAGCGAAGGAACTCAGCCATAC | | GAAGCACACTTGGTTTGTCTGCTGCCAAGTGTGGATAAT | |
| | | ATATACTTGTATCCATTCTCCCCTAAACCCTCCTCCCAT | | ATGCCTATTTGGTACACACTCAGCATTCATGTTCTGCCA | |
| | | TTAGGCTGGCACATAA | | AGCAGGCGTGAGCTT | |
| 348221 | SCAFFOLD | ATATTAACTGTTTATCTCTGCTTGGTGGGGTTATAGTTT | G/A | CATCTACTTCACAAGGCTGTGTGCATGTATGTGTGTGTG | 159 |
| | 157123_ | ATTTTTATGTAAGCTTTTCTGTATTAAAACTTTATTTTC | | TGTGAGATAATAAATATGGAATCCCTTTGTAACTCCAAA | |
| | 901 | AATGGGAATGTAATACTTTATATTAGACATTTAGGTTTT | | GCTTGCTAAAGGTGTCAGCTGGTATTATAATGATGATAA | |
| | | TTAATTCCTAATTGAATATGTTTGATAGCTTCTATTTTG | | AGTCCTGTGACCTAAAAGAGGTGAGAGAACCCTTATGAT | |
| | | GCACATGTCAGCCCTATGGAGCGAGGGAGCATCAACCTA | | AACAGGTAACTTTGTGCTGAGAGAGGAGGGAGATCTAAG | |
| | | GAATTCAAACAAGTTTTACCAGTCATTTCACCCGATCTG | | TGTGAGGACAAAAGTGAAAATATGTTTTTTTGCCTTAAA | |
| | | TAAAATGGGTACAATT | | CAATCACATGCCTGAC | |
| 346860 | SCAFFOLD | TTTTCACTGCAACATCTTTGCAACTTATTAATAGCCAGT | T/C | AGGACACTCTTAGCAACTGCCAGTTTAGATCCTCTAGAA | 160 |
| | 35037_ | CAATTTCATTGTCCTTCAATGTGTTTCATCCTTCATATT | | AGGTGATACTGAAATTAAATTTGAAGTGCAAGAGGGTGG | |
| | 3980 | TATCAAAAGTATGCATCATTATCCTACCCAGAGTAATTC | | TGGTGGTTGTTGTTGGGTTTTGGAGGAAGAAAGTGGTAA | |
| | | CTTCCAGTGGAATATCCTTCCTACTCTCCACCAGTGAGT | | CTCCTGTAAAATATAAAGGGAGGACATCAAAATGGTTCT | |
| | | TTTAGCACCACTTTTTACAGGAACTGTGTCTCACATACT | | GAGAAAAGCTTAAGACCATAATACTGATCTGTGCATGTG | |
| | | ACTTGGGATGGCAAGCGATCCACTCCTCAGATTCCAATC | | TGTGTGCTAAGTCACTTCTGTTGTGTCTGACTCTGTGTG | |
| | | CCACTTACCAGGTATT | | AGCCCCATGGACTATA | |
| 350535 | SCAFFOLD | CTTAACTAAATCTACCATTTTTAGTAGGTATGTCTTATT | A/G | CTTCTGTCTGGATTAGTTTTTGCAGCATACCAAGTTAGC | 161 |
| | 81100_ | TTTCCAACCTTGCAACAGTTTAGCCATACTTTTTCAGCC | | CTAAGATTTAGTAGCCTAAAATGACATCGTTCTGTGAGT | |
| | 3471 | ATTACATAATATGGAATGCCTTTTATTCAGGGTCCATTT | | TGACTACTGTTGATTGAGTGGTTCAAACTTCGAGTTTCT | |
| | | ACAAAATCTCACTGTCTTCCATCCTTTGCTAAGAGTTTC | | TATGAGGTTGTAGTAAGACAGCAGCTTAACCTACAGTCT | |
| | | CTTGAGATACTCAAAAGCTCTACTCTCTCCCTTATCCTA | | TCTGAAGTCTGACTGGGCTCAGCATCGAAGATTGCTCAC | |
| | | AACAATGTCAAACATTATAGTTTTTGTTATAGCAGCATT | | TCATATAACTTGTGGTGCAGAAATGCTGGCTATAAGCTG | |
| | | TAAATCTTGGGTGTTC | | GAAGCTGACTATAACT | |
| 348791 | SCAFFOLD | TATCTTACAGTTCTGGAGGTCAGAAGTCTAAAATAGGTC | G/C | TTTTGCCATGTGTGGCACCAGAATAAGAGGTTCTGGGCA | 162 |
| | 66709_ | AGCAGGATTGTATTCTTTCAGAGGCTCTAGACAGTAATC | | TTAGGACATAAACATATTCAGGTGCTTCTGGTTCACTTA | |
| | 2463 | CATGTCCTTGCCTTTTCAAACTTCAGAAACCATCTGCAC | | CTGATGATGGAGAATATGATGAATGAATAAGCAGGAAAT | |
| | | TCCTTGGCTCTGACCGCTTCTCCTCCGTCTTCAAAGCAA | | TCTAGAGATACAGTTAGAAAGCTATGGGCAATTGTTCAG | |
| | | CTTCAAATCTCTTTCTCTCTCTCTTTGACTCTGATCCTA | | GGATACAATAATCAGTGACTGGTGTATCAGACAGAAAAA | |
| | | GATATTCTGGGAAAATCTTCCTATCTCAAGGTTCTTAGT | | CAAGTTATCTATTTGCAACTGATGAAACAGTGAGTTAAC | |
| | | CACATACACAATATCC | | CAAGACTAGTTTGGTA | |
| 353906 | SCAFFOLD | TGAAGTTACTTATCCAAAGCTATAGAACACAAAGTCTTG | G/A | AAAATCAACCCCAAAAAGTCTAGGGGCAGGTCAAGAAAT | 163 |
| | 41654_ | CACACATTAGGTCTTAAAATATAAATTACATGTTAGTTG | | GTATTAAAAAAATATGGAAGAGATCTCAGCATGTTATCC | |
| | 3423 | TTATATTAGCAAAAGAGGCAGACCTAAAATATCTGGAGC | | TGAGGGAAGGACAAAATATTCAGTTTCAAGTACCACTAC | |
| | | ATTTTTTTCTCACCAAAATCACTGTTGTTTAATAGGTTT | | TGCACAGATCTGGTGGGACCCAGCTGTTACTAGAACCAT | |
| | | GTTTTTTTTGTTTGTTTGTTTTTCCATTTGTCTGGAAGT | | GAATGCTTCATTTTGCACAGAGAGGTATTTACAGGGAAG | |
| | | TCTTCATTTGTCTGGAAGTGTTCAAAAGAAAGTATAAAA | | TAATTTCCTAAGAGCAAGAGCTCTGGTCAACTCGGATTG | |
| | | GAAAAATGTTCATTAT | | GGTTGAAGGCATGCTGT | |
| 348449 | SCAFFOLD | ACAAAATCAATTACACTTTCAAAATGTATTACTCAATCA | T/C | TTTTAACAAGCTATAGCAGAAGAAAGACCACATTTTTGT | 164 |
| | 240809_ | GGAGACTATACACCAGGAGAATGCATCTGACACTCACTG | | CCCCTTAAACCAAGTTTTAATGAAGAAAAGATTCTGTTA | |
| | 6804 | ATGTTTGATCCTCTCTAAGTTAAAATCCTGGAAACAATA | | TATATGATTTCCAGTGGTTTAATATGGTGGATTGAGAGA | |
| | | TTCCAAAAGAGATCTTTGCTATGAGTAATATCATCATTA | | CTCATTGTCATGCCCTTGAGAAATGAAAATAACTGGGTC | |
| | | ACAGTGAGGTACATGGAGCTTATTTTTGAAGCTATAAAA | | TTAATTTTTTGCTCTAACATTAATTGCCAGACATCAAGC | |
| | | GAGGATGACAAAAAGCATATATATATGGAAACTTGGAGC | | CACTCAAGGATGGGCTATCTCATATAGACTATCTGTTTT | |
| | | CAGAGAAAATCAGATGG | | CTAAAATTTAAATCTG | |
| 349343 | SCAFFOLD | ACTCCAGGGCATCTCCCTAAACCAGGGATCGAACCTGCA | A/T | TCAGTTCAGTTCAGTTCAGTTGCTCAGTCATGTCCGACT | 165 |
| | 249581_ | TCTCTTGTGTCCTATATTGGCAGGTGGATTCTTTACTAC | | CTTTGCGACCCTATGAATCACAGGACACCAGGCCTCCCT | |
| | 1039 | CTGTAGAAAGACTTTATTTTGTAGGGCAGTTTTATATTC | | GTCCATCACCAACTCCCAGAGTTCACTCAAACCCATGTC | |
| | | ACACTGAAATTGAGAGGAAAGTACAGAGAGTTTCCATGT | | CATCGAGTCGGTGATGCCATCCAGCCATCTCATCCGCTG | |
| | | ACTCCTTCTCCCCCAAATATACACATTCTCCCCTACTGT | | TCATCCCCTTCTCCTCCTGCCCCCCCTGCCAATCCCTCC | |
| | | CAACATCCTGTACCACAGTGAAACATTTTTATAATTGGT | | CAGCATCAAGGTCTTTTCCAATGAGTCAACTCTTCGCAC | |
| | | GAGACTACATTATCAG | | AAGGTGGCTGAAGTAT | |
| 346663 | SCAFFOLD | TAATTATTTTTTCTCTTGTTACTCTATTAGAACAGTTTT | G/C | TAAAACATGGTATCCCTTGTGCCACTTACCCTAAAGGTT | 166 |
| | 26010_ | TTATTAAGATTATTTTAGTTTCATTGTTTATTTTTACTA | | TCTAAGCCTCTATTCCTTCTGGAAAGTGGACATGACTCT | |
| | 1655 | ATAACAGTGCCTGATTCAGTCCTCATAAAAGTTGCAATG | | TTATGCTGCTACTGCCCTTACCAGAGTAAATTTCACTTA | |
| | | TGACCTCAACATAGTGGATTTTTTTTGTGTGTGGAGTAT | | ATTCCAATGTTTTTGAATTTTTACTTTCTAGGTTAAAGA | |
| | | TTGTTAAATTTTTTTTACAATATTAAAAAGCAAAGATAA | | CTGAAATGGGTATATCTGATTAGCAAAATCTATAAGTGT | |
| | | TAGGTAGTAAAATGATTTTTGTATATTTTTCTTAGCTTC | | AAGGCAAGTTGGGAGAGCAAGAATCTGTAATTTCCAGCT | |
| | | TTGCCAGTGTCCATCA | | TATTTTTGGAAGGTG | |
| 349798 | SCAFFOLD | CAGAGGTGTAAGCTTTAAGGGTCCTGTTTTCCATAGGCT | T/A | AGAATCTTCATTTTAACAAGTCTGGCACATAAAGTTCCT | 167 |
| | 105315_ | TTTGTAATGCTGAGACAGAGCCTAGTTCCATTTGCCTCT | | CTGACAGAGAGAGCAGCCCCTCCCACTCCACTAAACCCA | |
| | 6308 | TGAAAGCATTTTAAAGGTTAAGAGAAACATTTAGTACTA | | ATTCTGAAAGGTTTCCAGTGAGGTCTTAGAGGTAAAAAC | |
| | | TGGCATTTTTCTCTATTCCAATGGCTCTTAAAGGTTTTG | | CAGTGCCCTCCTCTAATGATCTCCTAGACCTTTTGTTAG | |
| | | ATATATATAAGGATCACTTGGGGAAGTTGTCAAAAATAC | | CACCCATCAGTGGGTAACCCCACCTTCATCTATGCAGTG | |
| | | ATATTCTCTAGGCCTCAGTCTCAGACACTACAGTGTGCA | | TGGCTGCTGTGCAGAAGTCTCTCAAAGGGGCATCAAGCT | |
| | | GAGTCTAAGCAAATTC | | TTACACTCTCTCCTG | |
| 351627 | SCAFFOLD | AATATCTACCTCCAGGCTTTAAAAAAGGAAGAGGAGAGA | G/A | GGATTAAGGGATTAGCTTCAATCCGGTAAAGATTTTCTC | 168 |
| | 255096_ | CCATGCCTAGAAATAAAACTAAATAGCACAGAGTTCCGC | | TTTTATAGAACAACCTGCTAAACATCAGTCCCTACGAGT | |
| | 4614 | CAGCTCTGTCCCTCCTTGTCTTCGTGACCTTGGCCAAAT | | TGCCAGCACACACACATACATACCACAAGTGTGTGCCCT | |
| | | CACATCCTTTCCTTTTGCATTAGAAGGACTGATTAATCC | | AATGTTCCTTCTTGTCTCCCCACGTGGTTTTTTCATCCT | |
| | | CTGTCCCGTGTTCTTTCGTGGCATTTGTGAAGATTAAAT | | TCCTCCTGCAACACTCTTGCTCAACATAAAGATCTTTAT | |
| | | GTGATAAATGGTTGGAAAAGTGCTTGAAGACTGTAAATT | | GCATCCTGACTTTAGGGAAACTGTATTATGTTAGACTTC | |
| | | GATGTACAAATGGAA | | TCATGCCTGAGGGCAA | |
| 352113 | SCAFFOLD | AGACGCAGGTTTGATCCCTGTATCTACAAGATATCCTCA | G/A | GTAGAAATATTCAGTTAATTTTGCTACAGTGAAGTTGGG | 169 |
| | 170528_ | AGAAGAAAATGGCAACCCACTCCAGTATTCTTGCCTGGG | | TTCCTTCATTATTCTGCATTTCAGTTTGTTTTCCTGTTT | |
| | 2229 | GAATTCCACGGACAGAGAAACCTGGTGGGCTACAGTCCA | | CATAACAAGGGCTTTTTTTAGGATTTTTAAGGAATGTTG | |
| | | TGGGGTTGCAAAAAAAGTCAGATACAGCCTAGCGACTAA | | CCTTGAATTTATATCTCTCAAAAGTAACAAAGTTTTATC | |
| | | CAACAAAACAACAATTTCCAAAGCTCAAAGATAAATAGA | | TGAGAAAATATCACTTGTACGTTTTAATGAAAGCAGGAG | |
| | | ATCATTTGAAATAGCATCCATATATACAAGTGGTTTTAT | | CCATTTGGGGAAAAGCTAGAGACTTGGATATACGTGTTT | |
| | | CCTGACCTTTCTGACT | | TGGTACCCAGACTGG | |
| 353576 | SCAFFOLD | AAAACTGTCTTCCACGAAACAGATCCCTGGTGCTAAAAA | C/T | GCCTTCAAATTAGTTTTATTTCATCGAGGGGCAAGAGTA | 170 |
| | 245583_ | GGTTGGGCCTTACAGGATTGAGAAAAGAGTGCTATCTCC | | CTTCAGTGGACCATGTTCCAAGTTAGAAACATGTTTCGT | |
| | 8789 | TAAGAAATTAGCTTGCTGGCACCAGGAGAAAATTGCTCT | | CAATGTGGATTTAGATTGTAACACGTGTGTGTGTGCTGT | |
| | | TGTCAGTCAAGCAGGCATTCCTGTGTCCTCTAAGATGTC | | TAGTGTGCCAGTGTGTCCAAGTGCCCTAATAGTTGTATC | |
| | | TGGTTAAGTGAACGCAGGTGCAGGATGCACACTAAAGAG | | TAGGATCACTCAGGGGAGAAGGCAATGGCACCCCACTCC | |
| | | GGATAGTGGTTCAAACGAGCAGGGAGAGAATTTATGTTT | | AGTACTCTTGCCTGGAAAATCCCACGGATGGAGGAGCCT | |
| | | AAAATTTTTCTAGCCC | | GGTGGGCTACAGTCCA | |
| 348728 | SCAFFOLD | TTGGATCTCCTTGCAGTCCAAGGCACTCTCAAGAGTCTT | G/A | TGTATCTTGAATCCCCTTTTATCGTTTCTGTACACAGCC | 171 |
| | 47314_ | CTCCAACACCACAGTTCAAAAGCATCAATTCTCCGGTGC | | CTGTGGAGGACTTCTCTTCAGCTACTGGAGTTGTTTAGC | |
| | 3413 | TCAGCCTTCTTCACAGTCCAACTCTCACATCCATACATG | | CCAAAGTATGTGAAGGCTTACCTCCTTGCCTTGGGTCAA | |
| | | TTTCACTCTTTTTTATGGCTAATAGCACTGCATAGCACC | | GACAACCCTGATGGATTAAGCACTGTTATAAGCACTTTT | |
| | | ACATCTTCTTTACGCCATCTATCTGTCGATGGTCATTTA | | ATTTGCATAATTTTCTTTAATGCTTTCAACTACTAACTA | |
| | | GGCTCCTTCCGTGTCTTGGCTGTTGTAAACAGTGCTGCT | | AAGCAGGTACTATCATTTTAAGGAAAAATTTTTTTAATT | |
| | | CTGAACTTAGAGGTGC | | CAGAGAAATAAAGTAA | |
| 348913 | SCAFFOLD | AAGGCATATACATCAAACTCACCACACTGGTTGCCTTGG | T/C | AGAGTTGAACTCAGCTGCTAGTTTCACTCTGATATTCTG | 172 |
| | 103011_ | GGGATGGAGCAGAAACATGGGCCCGAGTTTGGGGACAAA | | TTTCATGGGAGCCAAACAAATCTCTTAAGAAATTTTGAT | |
| | 2035 | GAAGACTTCGATTCCACCGTAATCTTTAGTTGTGTTTAA | | TCGTAAAACTTAGAACTGAGATATGCAGTGGAGACCTAA | |
| | | AACCATCCAACAAATAATTACATCATCATTGTTACCTTA | | CTCACATTCAGGGAAGACAAAACATAAAGAACATCAGTA | |
| | | GTGTAGTGGGTACAAAATTACCTGTAAATTATTTTCTGC | | ATTCTGGTCATGGTGCCTGCCACTCATGGCTTTTTAGGT | |
| | | ACTATTCTGTATTTTTCTTTAATTACTGGAGATAATAGG | | TTCTGATTTGGTTTTCTCCTTATGTAATCAAATTTGTAA | |
| | | TAAAAGGAATGAGAA | | TCAAATCATACATGCA | |
| 349578 | SCAFFOLD | GAGACTTGGAAATCTGGCACGAGATCACTCAGGAAAAAG | T/A | CTGTTCCATTTACCAAAAATTAGTGGCAACTCTAAGAAG | 173 |
| | 350635_ | CGTGTGGAGTGAGAAGAGAAGAGCGTCTTGGACAGAACT | | AAGAAGCCTCAGGGAGGCCGTGAGTGAATAAGGCCAGGC | |
| | 386 | CAAAGGAACTCCAAAAGCAAAGGGAGAAGCAGGGTTTCG | | TGCAACGGTTTGAGAGCATGTGAAAAGTGAAGGACAGAT | |
| | | TGACAGAGGCGGGAGGAAGAGGCAGAGCAGGAGGAAAAC | | CTGATGAAAAGGAATTTAAAAAGTTGGAGGTAATTTCCT | |
| | | CACAGGAAGAGGCACAGGAGCCTAGGAACACAACGGAGG | | TCTTTACTGTTCTCTCTTGGCTACTGAGAGTCTACATTT | |
| | | CAGTGTCTGGGTCAAATGCTGCTGCGAGGCCAAACAAGG | | TCCAGTTCCACCAGCAATGTAGGGGGTTCCAGTTTCTCC | |
| | | TGAGGACTGAGAAACG | | ATCTTATTGTCTGTCT | |
| 347472 | SCAFFOLD | TTTGCCTAGAAATGCAGCCCATAGCATTCATGGGTTTAC | A/G | GTTGTGAATTTTATTTGGGTTCTTCAATTCTACCTTCCA | 174 |
| | 232640_ | TAAACAGATGATTTCAAGATCCCTGGTTAGACACCTCCC | | TTTTGATACTTTACAGTTCTGTTTTCTGAATGACTTTTA | |
| | 992 | ACCTACCTTCATGCAAATTTGAAAAGTACATCCATTTCT | | TTAAATCACTGAGTTTTTCAATTATACCAGTTTCTATGT | |
| | | CAAGAAAACTTTACTTTTCCTCTCAGAAAGTTATCACAG | | TTTCCCACTTCAATAAATTTAGTTTTAACACTTATTTTT | |
| | | TATGGGGGCTTTGCTGACACAAGATATTTTGTTATCATG | | GTACTTAAGAATCTTGACACTATTTGTTTATTTCAACAC | |
| | | TGTTAGAATGTATGATAAGTCAACAAATCACTGGGGTGT | | CTTTAACATCTTGCTCTATTTTTTCCCCTATTATTTTTA | |
| | | GAACAGCCTCCCCAGG | | TTTCACAGATATTTGTA | |
| 349376 | SCAFFOLD | ATGCATATTTATAACCCAATGATTCCTCTTCTTGGTATA | G/T | TGATGGTGAATGAGAAAAGTCAGACACAAAAGAGTACAA | 175 |
| | 26010_ | TGCACAATAAAAATGTGTATATATTTTTACCAATAGTCT | | ATTGATGATTCAGTCCAGTTCAGTTGCTCAGTCATGTCC | |
| | 6081 | AAGAATGTTCACAGCACTGTTATCTTTAAAAGCCTCAAA | | GACTCTGCAACCTCATTGACTGCGGCACTCCAGGCCTCC | |
| | | CTAGAAACAACCCAAGTGCTCATCAACAGTACAATGAAT | | CCGTCCATAGCCAACCCCCAGAGTTTACCCAAACTTATG | |
| | | AAATAAATTATGGTATATTTACCCAATGGAATTTTATAT | | TCCATTGGATGATTACAATAATACAGTTGAACATGTAAA | |
| | | AGCAATGGGAATGAACCAATTACAACTACATGCAACAAT | | AGTAATGTGTGGCATAATAAGTCAGGATGGTGATTACAT | |
| | | ACTGAAGGATCTTGCA | | TTGGAAAGGAGGCAGC | |
| 350721 | SCAFFOLD | ACTTTATTAATAGACACACAGACACTTGTGAGTATTGCA | T/C | GCCTAGGAATCAGTATTTTTAAATTTTTTATAGCTGATA | 176 |
| | 146466_ | GATCCTGCTTTTCTAGATGTAGGATGGAGTTGAGGTTCT | | AGGGCTTCCTAGGTGTCGCTAGTGATCAGGAACCCACCT | |
| | 8003 | GCATTACCTGCAAGTTCCTAGATGAACCATGCTTCTGGT | | GCCAAGCAGGAGACATAAGAGACACTGTTGCCATCTCCA | |
| | | CCATGGGCCACTCTTTAAGAGTATAAAGAGATGGCTCCC | | GGGGTCAGGAAGATCCCCTGGAGGAGGTTATGGCCACCC | |
| | | AAACTTGGTTGCGTATTAGAGCTGCTTGGAGAGCTTTTA | | ATTTCAGTATTCTTGCCTGGAGAATCCCATGAACAGAGG | |
| | | AAAATCAGGATGCCAGGCCACACCCCTGACCAGTTAGAT | | AGTCTGGTGGGCTACAGTCCGTGGGGGTCATACAGAGTC | |
| | | CAGAATCTCAAAGTGA | | GGACACGACTGAAGCG | |
| 346682 | SCAFFOLD | AGGGAGACAGGCGCTACTGATAACAGCCTCATCACCATA | C/T | GGCTGTGTGACCTTCGAGGAGCTGCCTAACCTCTCTGAA | 177 |
| | 270033_ | ATCACTGTGACTGAGTGTCTTTCATAAGCCAAGTGTTGG | | TCTCTGTTCCCTCATCTATGAAATATGGCTAAAGTTACT | |
| | 18768 | CGACTGTACAATAATGCAAACAGGCATTATTATCCCCAT | | ACCTGCCTCACAGATACACATCAAATAGCCTGGCATATA | |
| | | TAGCAGCTAAAGAAACTGAGACTCAGAGAGGCTAATGTG | | GTCTAAATGCTAGGCATTTATTAGATATTGGAATTATTC | |
| | | ACTTTCCTAAATCTCCTAGCTAGAGAGGAGACAGCAGTG | | AAGTAGGAGGACAGGACTTGGTGTCCAAGTCTGTACAGC | |
| | | TATAAATTTCATATATTTAGGTTCTGCCTGTAAATGCTG | | AAAAGCCTGCATGAGTGCTGTCATTCTGTGGTTGTTTGA | |
| | | AGTTCTCTATTTAC | | GACCATAGAAAGCCTC | |
| 348436 | SCAFFOLD | AGACCTTGAATATGCAAGTCCTTCTAAACCTTCCCAAAT | A/G | TTCTAAGGTTGCTAGACAAACAAGAATGTAATCGAAGGC | 178 |
| | 236528_ | GAAAACCTTTCAATGACCATGCCAAGAAAATGTGATTTC | | CTAATTACCTAAAATATTTTGAAATGGGTGCTCAACTGG | |
| | 4224 | TTCAGAAACCACCTCCACTATGCTCAAGGAGGGTTAAAT | | AAAATAGGATGTAATGTCATGGTTTGAGCACTTGGGAAG | |
| | | GGCAGCACAGTTCAGATAGTAAAGTACAAGACATGTGCC | | AGGTATTAATATTCAACTAGGTTAGCCAATCTTGACAGT | |
| | | TGGAGGAGACAGATTGTTTGCCAAAAGAAGTGCAGGATT | | AAGCTATAGCCAGTAAGACTGAAATATCAGACATGCTAT | |
| | | TCATTAACTTACATCAACTCCTGTAAAGAGTTCTGGGGA | | AGACAGAGGTCTAAATGCTAAAGAATGTGAGGATGCTAA | |
| | | ACATGCATTTAACTAG | | AAAGGATCTATTATAT | |
| 344696 | SCAFFOLD | CCCTAACTGAAAGATGGGAGTATTATCCCACCTCAAGAG | T/C | GCATCCCCCAAATGCTCTGTATGTTTTGTGTCAGACACC | 179 |
| | 165011_ | ATTATTGTCGGAATTGAATGAGATATATGCAAAGAGTCA | | AGAGCCATTCTGGAGAAGGAAATGGTAACCCACTCCAGT | |
| | 13796 | AAGTGTCTAACACATAGGAAGTGCTACTTAAAGATTAGC | | ATTCTTGCCTGGAGAATCCCATGGACAGAGGAGCTTGGC | |
| | | TATTATTTCATCAGAGAGCTCAGACTCACTGAAATCAAA | | AGGCTACAATCCATGGGGTCGCAAAGAGTGGGACATGAC | |
| | | TAGCTTGCACAAATCCACACAGATAATAAGACAGAAACT | | TGAGCAACTAACACCCTTCTCCAGAGCCATTCAGTTGTA | |
| | | ATAATTTGAGCCAATGTGAGTCACAGCTGGTTCCCTTTC | | GAACAGGAGAGATGAGACTCCAGCTGGCCTCAGCCTGCC | |
| | | CTCTTCACCAGGATAG | | CCTTCCTCTGGGAGAA | |
| 349604 | SCAFFOLD | TTGTGAACCTTAAAACTAGAACTCTTTGCTCCCCTAAAG | T/C | GGGAGTACCAGTGATGGACAGGGAAGCCTGGCGTGCTGC | 180 |
| | 45297_ | TTAGGCTCAACCTCCCATCCTAGTATTAACTCAACAATA | | AGTCCATGGGGTCGCAAAGAGTGGGACACAACTGAGCAA | |
| | 15085 | ACTATCACTTCCGAACTCACTATGGCTGCTGTTCTGTTT | | CTGAACTATACTTGTTAAACAAACCAAAAAAAAAAAAAA | |
| | | CAGCATCTAGAAAAGAAGTAATGAAAGGCTTCCAGGTCT | | AACACTATTTGTAGTATTATTTCTAATTATATTTGTGTT | |
| | | GTCTTCACCACCTACCACCTGATTAAACCTCTCTGACTC | | TTAAATGGATCAAGTATTCAAAGGGTTCAAAATACAAAA | |
| | | TCTAACACTCAGTGGGAATAAAGTGCCTCCTAGTTACAT | | GTTATTTAAAAGATACAAAAAGTCTCCCTCCCATTCAGT | |
| | | TGCTGTAAAGATAACA | | TACAAGTATTGTATCG | |
| 347934 | SCAFFOLD | AGCTTAGAAAGAGCTTAGAGAAACTTAGAAAGAACTTCT | C/T | GTAACTGTTGGTGGGTCATCTCTCCTCTTGGAGCCTCAA | 181 |
| | 8758_ | GGTGATGAAAAGGGTGGGCAAAGAATCCTGACCCTTGCT | | GCTTTTCATCTCAGTTGCCTAGCATATCAGGTTCACAGG | |
| | 12645 | CTATCATCAGCTCTCTGAGAGACCAAGCTTCATGCTCTC | | AAATATTTGCTGAATCAATGGGAAAATAGGGGACCATGC | |
| | | TCTGGGCCTCAGTTTATTTTCAGTGAAGTTTGAGTGTCA | | TACCTATCTTGGCTGCCTCCCTGCGTGATAGCAAGGATA | |
| | | GGTTAAATGCTCTCACCTTCTTTGGGCTCTTATCCTTCT | | TAGTAAGATAATCCTACACAGTGCCAACTCGAAGAGTGG | |
| | | GAATCTATGGATTGGACAGAACTGGGTGTTCTCTGGTTC | | GTTGCTATGATTCAGCTGGATCCAGGACTGGGTTAACTT | |
| | | TACCTCTTACCAGCTT | | GTCTTCCCCCAGCCCC | |
| 353490 | SCAFFOLD | CAACTAAATAGCAATTATGGTTTTCTGAGCTATAACTTG | G/A | GTATTTAGGTTCTATTCTTATTTTCTGGCTTGTTTGTTG | 182 |
| | 15117_ | AGCACAACTGTTATCATCCTGAGTCTTACTGCAGCCATT | | CTAATTATCATCCCCTTATCCAAATGATGGCATGTTATT | |
| | 27374 | TGTAAGTTTCAAGTGCACACAAGAACATCATTTATCTCT | | AATTGCTTCTTTCTGTGTTGTTGTGCAATGCTAATGCAT | |
| | | TTTGGCAGGCAAATACTTTACCGCCCTGCAGTTAAGATT | | TGTGGAATTCAATAAATATTAAATCAGCCAATCAATCCT | |
| | | ATAGATACTTCGTTTTAGAGCTGTTCATTTCTGTTCTTT | | TTTGGTTAATTTAGTAGATTCATACCTATTCTTTCCAGT | |
| | | GCATCAAAATTTCAAGGATACTAATAATAAGCTAACAAA | | AGGTTTTTATTAATAAAGAATAATTGATATAACAAAATC | |
| | | ATCGTTGAAAGAATTT | | ACAAATTTAAAGTT | |
| 354173 | SCAFFOLD | GTGTCGAACTGAGCAATAAGTGTAGAGGTGCATTATTCT | C/T | ATTATCTCAATTATGTTATTTCTACATAATCATATCTCC | 183 |
| | 260326_ | AATTATGTTGACAAGTGAATTTGTAATCAATGAATTAAT | | AAATTTATGGTGAATCATGAAATTAAGTTCAATGAAATT | |
| | 4125 | TCAATTTCAGATAGCTAGAATCAAAAGTATGGCTTTACA | | TCTTCTGCAATTAAAATGTACTTTTTTATTGTTTACCTT | |
| | | TAAAATAAAAACTCAAGGGAAAAATATGAACTACTAAGA | | TTGTTGTTTTGAGGTTTGTAGATACCTTGAAATAGGCCA | |
| | | GCACTGAGAATAACTAATTGGTATTACACTTTCGACATT | | AATTGCATAAAAAAAAAAAATGCAGTGAGTCTTCTTTTA | |
| | | ATTTTCAATAGCAATTTGTGTTATTTAAGCATTTTGTTA | | GTCCAAAGGAAATACCAGCATGTAAAAGTTTATTCAAAA | |
| | | TTTAAGTATCCATCAG | | GTTTACTCATGTTTC | |
| 351064 | SCAFFOLD | TGATGTGATCTCTCAGATACCTCTTAGACTATGGGGACC | G/C | TAAGGGCCAGGCATGTGTCAGAACTCCATCTAACATCTG | 184 |
| | 295006_ | AGACGGCCATCAGATTCCTTGAGGGCCAAATGGATTGCG | | TCTTACCATTTAGTCAGTGCTTATCTTTTCCAATAAGCC | |
| | 45401 | AAGTTCTCACTGGCCTTTACAGCAGCTACAGGCTCTAAA | | CATAAGGGCAGAGGCCATATGTACACTGCATGCTGTTTT | |
| | | TGTCACTCCCCTAAGGCTCCATCCTGGGTTCTTATTCCC | | AACTGTAGTCCCTGATATAGAACCTGGAATCACAGGTGC | |
| | | TCTAGTCCTCCTGTAGCTGCCCTATGGCTCCCTATAGTA | | TCAATAAATACAGGGTGAATTAATCTAGACCAACCCCCT | |
| | | GAACTGAATATGGCTTAAAGTATGTATTTATGTGATTAA | | TACTTAAGAGTTGAGCGTACTGAGTTTCTGAACAATTAG | |
| | | TTTCATTAACTATTTG | | ACATGTAACCCAAGTC | |
| 342761 | IBISS4 | GCCCTAATCACACAGACAAGGCTGGTGCCAGCCTTAGGC | G/C | TGTTCACCCTCTGGCCAGACGACTGTGGTTCAAGACACA | 185 |
| | snp758 | TTGACACGGCA | | TGTAAATTGCT | |
| 345383 | SCAFFOLD | ATAAAAATTTCTTTTATCGATCCTCCCATTTTCTGAACT | C/T | GCACTTCAGAGGAGCCTACTTCTCCCTTTTCCACCTTAA | 186 |
| | 115964_ | TCTAAATATTTAGAGTGAGTAGTATTCTAGTTCCCAATC | | TTCATTCATTAGTGGTGGTTTCCTTTGGTCCTCTGGATT | |
| | 5023 | AAATACACATTTGGGTACCATAATTTGTGTTTTCTTTGT | | TCCTTTCATCAGTGAAGGAGCACCATCTGGTAGCAGACA | |
| | | AAAGGTATGTTGATTTTTTTTTTTCTTTCTTTCAAAGGA | | ACAGTAAAATCAAGCTACACAGAACACACGCAGGGAGGA | |
| | | ACTCTTTAAAAATATGATAATTTTCTTCTAGGATAATGA | | CTCCCTTCAACCTCCCTCCTCCCAGCCAACATCTGCTTC | |
| | | TGTTTTTGAATGCCACACAGAAAACAGCCTCTTTCTCAC | | CCTCTGCTGTTTGCAGTGACATTTTAAAGGGAAAACTGG | |
| | | CGATTGTATTTCTGTAAA | | GAATCATGGTAGTAAT | |
| 345918 | SCAFFOLD | CCTTCAATGCAGGAGACCCCTGATCGATTCCTGGGTTAG | C/T | ATACACGACTGGGTGACTTGATCTTTACCCCAAATCATT | 187 |
| | 305304_ | GAAGATCAACTGGAGAAGGGATAGGCAACCCACTTCAGT | | CAGGCTTCTCTGGTGGCTCAGTGGTAAAGAATCCACCTG | |
| | 4542 | AATCTTGAGCTTCCCTTGTGGCTCAGCTGATAAAGAATC | | CAATGCAGGAGCCACAGGAGACACAGGTTCAATCCCTGG | |
| | | TGCCTGCAATGCAGGAGACCTGAGTTTGATCCCTGAGTT | | GTCGGGAAGACCCCCTGGAGGAGGGCATGGCAACCCACT | |
| | | GGGAAGATCCCCTGGAGAAGGAAAAGGCTACCCACTCCA | | CCAGTATTCTTGCCTGGAGAATTCCATGGACAGAGGAGC | |
| | | GTATTCTGGCCTGGAGAATTCCATGGCCTGTATAGTACA | | CTAGTGGGCTACAGTCCAGGTCACAAAGAGTCGGACCGG | |
| | | TGGGGTCACAAAGACT | | ACTGAAGCAGCTTAG | |
| 346960 | SCAFFOLD | GCTACGTGCTCCTGTATTTTGTCTTTTCTGTTTATCCTC | G/A | TTAACAAACAGGTCGTCAACCCATGTGTTCTGAACTATG | 188 |
| | 70112_ | ACTTTTGCTATCTGGAAATCAAAGTTACACCCTCAGAGG | | CAAGAAATGCAGACTGTTTCTTTACCTGGGTACACGGAA | |
| | 31828 | AGGATAAAGAGTTGGTTTGAAAGCTTCCATCTGAAAGAA | | GAAATTTCACTAGGCATGAAAATAGGAAGATACTTACAG | |
| | | TACGTGAAAACTATGGCTTAGAAAAACCTTCGGATTCTT | | TATTCATCTTAACAATGTGTGTATAGGTGAGTAAAATTT | |
| | | CACCACTGAGCCACTCTAACATGTATGAAATGTCCACAG | | TGACTAAGTCTTAGAAGAAAGAAAGAGAAAATATTTTCT | |
| | | GGTGGAAGCTCTGTGGCAGAACGTCAAGAAAGGGTCTCT | | AAGATAAGTTCATGGTAGCAAAATAAAGTCTAAGCTATG | |
| | | TGTGCTCTGGAACATC | | AAACATTNNNNNNNNN | |
| 346264 | SCAFFOLD | GTCCATGGAGTCACAAAGAGTTGGACATGACTGAAGTGA | T/C | GCAACTGTATTTTTTGCCCTGCATAAAATAGCAAAAATA | 189 |
| | 112150_ | CTTAGCACATGCACCCAATCACCAATGTGAAAAACGAAA | | ATTAAACAAGTTCGAATAATCAGGGCTACTTTGACAAAC | |
| | 2535 | AGCACTGGGCAATGATCTGGGGCAAGAAAAGACAGAAGG | | ATAATTATTCCAAAGCCATTATGCCATTACGCCATGTAT | |
| | | AAGAACGTGGGAACAGGAGGAGTTTAAGGCCACAGCCAC | | CATAACACTTTCTTGTTTTCAAAAGAAAATAAAAATAGA | |
| | | GAAGCCATGTTTTTGTTCTTTTGCCACAAAAGCAGGCAC | | GAAATCCTTATATTGGTTTAGCTCAAAGGTTTATCCAGC | |
| | | TGATCATAGAGTTTAAGGCTTAGAAAGCAGGGAAAGCAC | | CTAACAGTGCATGTGACAGGCTCAAAAGGAACATCGTAT | |
| | | CTGTCAATAAGGACCA | | GGAAGGGCCAAGTTTT | |
| 342912 | SCAFFOLD | GGACACAGGGCATTTCAGAAAGGAATGAGTTTATTAAGA | G/A | ACTGAAGTGATGCAGCAGCATATCCTTGAGACAAAGAAA | 190 |
| | 18551_ | ACAAAGAGCAGAGTTAATGGGGACACTGAGAGCACAGTG | | ATTCCTGCTGGAAGACTGGCGGTAGGTGATCGGTTTGGG | |
| | 1128 | GGCCAACCTCCTGATGGACCAGGGAAAGCCAACAATTTT | | GCACTATAGGGTGTTTACTGGAGTCGGCATCTTTGCTTA | |
| | | TGCGAATAGCCAATGTTTATATCCTTGAGTGGAGAAGGA | | ACCAAGAGTCAGGAAGTTTGTTAGTGATGATCAGGAGGC | |
| | | AATGGCAACCCACTCCAGTGTTCTTGCCTGGAGAATCCC | | TTTTGGCAATGGCTACAAAGGGGCTCAGTCAGCTTCAGA | |
| | | AGGGATGGGGGAGCCTCGTGGGCTGCCGTCTCTGGGGTC | | GATGACCTTGGTTCTGGGCTCCACTTCCATGGTTTTGGT | |
| | | ACACGGAGTCGGACAC | | GCAAGGCCTTGCACCTG | |
| 345811 | SCAFFOLD | AACAAAGGCATGTGTAGTCAAAGCTATGGCTTTTCCAGT | A/T | CCAATACCTTGGCCACTTGATGCAAGAAGCTGACACCTT | 191 |
| | 264251_ | AGTCATATATAGATGTGTGAGTTGGACCATAAAGAAGAC | | AGAAAAGACCCAGATGCTGGGAAAGATCGAATGCAGGAG | |
| | 648 | TGAGCACGGGAGAATTGATGCTTTTGAACTGTGGTGTTG | | GAGAAGGGGAAAAAAGAGGATGAGATGGTTGGATCGCAC | |
| | | GAGAAGATTTTGAAAGTCCCTTGGGCTGCAAGGAGATCA | | CACTGACTCAATGGACATGAGTTTGAACAAGCTCCAGAT | |
| | | AACCAGTCAATCCTAATGAAATCAATCCTGAATATTCAT | | AATTGTGAAGGACAGAGAAGCCTGGCGTGCTGCAGTCCA | |
| | | TTAATGAATATCAGTGAAAATCAGTGAATATTCATTGGA | | TGGGGTCACAAAGAGTCAGACACAACCGAGTGACTGAAC | |
| | | AGAACTGATGCTGAAC | | AACAACAACTCTCTAT | |
| 352161 | SCAFFOLD | CAAAGAGCTGGACACGACTGAGCACACATTTATTTATTT | C/T | TTTACTCTGTAGTCCATATTGTTGATTCACGTGGAATGG | 192 |
| | 205065_ | GGAAGTGCTGGGTCTTAGCCACTGGATCACCAGGGAAGT | | GAGCCTCGCAGAATATGCCTTATTTTCCTTGGATTGTGT | |
| | 7302 | CCCTCAGTACTCAACTTTGAATTGTTTTGCAGTCCCCTA | | GTTAATTTTGAAGTCTGTCTGTGTGCTAAGTTTTGGTGA | |
| | | TCAGCAGTGCCTGCTTTGAGACTTCAGAGGCATCTGGTA | | ACATATGCTTCAGAATGGAAATGTCAGTCCAGAAGATAA | |
| | | AACCACGATCTTCTGACTTGCAGAAGGTCTTTTCACATC | | AAGAGAGATAAAAGTTGAAGATTGAAAGGTGGAAGTCAT | |
| | | CTTGGAGGCCTTGGCAATTGAATCCTACTCTTCTTCCTA | | ATGCTCTCCAACTGGATAAGAATCCCAAGGGAAAGAATG | |
| | | GTGTAAACCTTTGTTA | | TAAAAAGAGAAGACTG | |
| 352870 | SCAFFOLD | CAGCCATAACTTCCTTTTTGCCCTTTGGCTAGGCTGCCT | T/G | AACAAATGGAACTAGAATAATTCACCAAATCATACACTT | 193 |
| | 305349_ | AAGGAGGAGGACCTCGGCCAGTTCTGTTCTGGAGGTGAC | | TATTATTTTTGAACAACCGCGTCTCCCACTTGACAGTAA | |
| | 22810 | ACACAGATGGATGCTGGCAGGAAGCTGAGGACCAACACT | | GCTCCATACAGGTGATAAACATGACTCTCTTGTTCAGTG | |
| | | CCTCAAGGCTGAGGGCTCTGTGCACCCCTGACCAAACTT | | TTGTAGCTCCAGTACCAAAAGGTGCTTAGCGAGTGACAG | |
| | | CTGATGCAAAATATTTACACTAATGTCACACATTTATAA | | GGGCTTGGCAAATGATGACCACAGCTGACACAGACCAGT | |
| | | AAAACAATTGCAACTAAAGATATCTTGCAGCAACTTTTA | | GGTCAGCTCTTCCAGGCACATGCTTTCACTTTCCATGCT | |
| | | AACAATGCTCTACAAA | | GTCTCTCAGGTAATCC | |
| 353614 | SCAFFOLD | TCATTCACAGCCCATCTGAATAAACACCAGACGTCCAAT | G/A | AAGAATGAGAGTTATAATATGCAAATATATCATATTAAT | 194 |
| | 285370_ | CTGTATACATTTTGCCTATACAAAGTCTAAATCTTAGTA | | GGTATATTATATTTATTTGATGACATCTTTTCCAATTAA | |
| | 4116 | ACAATACTGAGCTTATGTAAAACTGAACTTTTCATTCTT | | ATAGGAAGAATTACATTTGAACAAATCTCATAAATTAAA | |
| | | AACTACATGTAAAGTAGACATGGCTTTGTGTTCTCTCTT | | CAATGCCTTCCTCTGTTTTGTTGAAATTTTTAATAATTT | |
| | | TTTGTGTCAAAACCAATTATTAGGACATCCTAAGCTGTC | | TATTTGATTAGTGGGTTACTATTTAAAGAATCCTCAAAC | |
| | | TTTCTTAGTGGCAACTTAGCCTTTACTTTAAAAAAAAAA | | ACTATAGCTTCTGTCTATACAATTGATTTGTTCATTTTT | |
| | | AAAAAGGTTCCTGTAA | | TTATGAGATCAATATA | |
| 348400 | SCAFFOLD | CAGAGCATATGAGGACTCCAGGTAGACAGAATTTGGCTC | G/T | GAGAAGAGTCTTCATTTCTGCTTCTAAGAGGATAACATT | 195 |
| | 221545_ | AGAATGCTCCCAGTGGGGCAGGTATCTTCTCTGTGTGTG | | TACCTCCCCATTGGTAAAATTACAAATCAGTGTATTTGA | |
| | 4766 | CTGGACCATGTCTTGTCTTGCTTGGCACCCTCCCCACCT | | AAACCACTTTGCAAAGCACTTTCCTTTTCTCTCAATTCA | |
| | | CATACCTTGCTGTCTCCCCCTCCTCTGTGGTCATGAACA | | GTCTGACAAGTATTTCGTCAGCACCAACTTGGTGCCAGG | |
| | | TGTGCCCACCCTGCTCTCAGCATCTTGATGCATTAACCA | | CATCTTTATAAGGAATCTGTGCAGGAGGTGAGGCGCTGA | |
| | | GAGGCTTCCCCTACCTCTCCTGACTTATCCCCCATCCAA | | GAATGGTACTGAAGTGCCCCATGGCTCCTGACAAATTGG | |
| | | CCACAGACTTTTTTCC | | GGACTGTGCTCAACCC | |
| 348888 | IBISS4 | GCATCCTACATTTATCCTGTGTTCTGCCTTTGTTTTAAT | T/C | TACAGCAGAAGGGTTCTCTGGGTCCCCAGTTTCCAGTTG | 196 |
| | snp785 | TTTGACTCAGC | | ACAGTATATCC | |
| 346608 | SCAFFOLD | TCCCTGGAAAGGTGTGTCGAATTCCAAACCAGTGATACA | C/T | CCTCTGAGTTATATTCTCCCAGCTCAGTTCCATGATTTT | 197 |
| | 242466_ | CAAACAAACCTTTGAATCATGACCCTACAGAAGCTGGAG | | GTCTGAAGTAAATGCCCAAGGTAGCAGATAATCCTGCTC | |
| | 580 | AACTGTCTGTTCTTTTGACTTGTCCTTGAGCTCTTTGAG | | TACTAGGAACCTGCCAGTGATGTCTTCAGCCAACATTCT | |
| | | GCATCCCAACTGCCCTCCTAGTGCTACTCTTCTGGGATT | | CTTCGTAGGCCTCCAGTGGCTATTTGTATCTGCATAAGA | |
| | | GTGGGACTCTCTGTTTGCCTTATGATGGTTTTCTAAACT | | AGACTCCTGAAAGTCCCTTGGACAGCAAGGAGATCAAAC | |
| | | TCAGATTCCAACAGGGATTTGACCAGACAGGAACAAAGA | | CAGTCAGTTTTAAGGGAGATCAACCCTGTATATTCACTG | |
| | | GGACCTGAGATCTGGT | | GAAGAACTGATGCTGA | |
| 348360 | SCAFFOLD | CCTGTATGGAGCCTTGTTTCTGGCTCCTCTGTGGTGCCA | C/G | CTAAGCTAAAATAACAAAGCAAAAACAAAACCCCAATTA | 198 |
| | 210144_ | GAACAGAGTTCCTGCCAGTCAGCCGGTCTGGGGCTTAAA | | TTTTTTTCCATAGAGAGAAAAGACTAATTTTCATTTGTG | |
| | 9408 | GATTTCTTCATACTGCAGCTCTGCAAGCCTAAATGAAGA | | TGATTTTGAAGGACTTAGTTAAATATGGCACTGCCAGTC | |
| | | GCAGATTATAGAGTCTTAGACAAATAAAAGGAATACTGA | | AAAGCACAAATTGAGAGACAGAATAACACTTCCATTTAG | |
| | | GTGGTTATAAAATCTTCCTTTTTTGACTTGAAAAACAAA | | AAAGGTATTTTCAGATTCCTTGTACTAAATTTTACTCTG | |
| | | TATGCCTGTATTGTCAGGCTGTGTGTACATTGATGCAGG | | TATGTTCAGCAGTGGCTGCGTAATTATTGCTTCCATGTA | |
| | | CTTGCATAATACAGCT | | CTGACATGCCAGAGTT | |
| 348820 | SCAFFOLD | GGGCTCAGTGGTAAGGAACCTGTCTGCCAACTCAGGAGA | G/A | TTGCCTGTGTTTTCAGTTGGCTTGTGTTTTTATTATTGA | 199 |
| | 80920_ | CTGGGGTTTGATCCCTGGATTGGAAGATCCCCAGGAGAA | | GTTGTAGGCGTCTCTTCTGTATTTTTTTTTTTTTTGGCT | |
| | 8235 | GGGAATGGCAACCCACTCCAATATTCTTGCCCGGGAGAT | | GTGCTGCGTTGTCTGGTAGGATCTTAGTTCCTTTCCTGA | |
| | | CCTATGGACAGAGGTGCCTGGCGGGCTACAGTCCATGGA | | CCAGGAATTGAACCTGGGCCCTGGGCCGTGAAAGCACAC | |
| | | ATGGCAAAGAGTCGGACATGACTGAGCACGCACACACAT | | AGTCCTAAACACTGGACTGCAGGGAAGTCCCTCCTTCTG | |
| | | TTTTCCATGCACTTATCAGCCATTTGTACATTTAGAGAA | | TATCCAGATACAGATCCCTTCTCAAGTGTATGGGTTGCA | |
| | | TTGTCTATTCAGGTCT | | GAGGTTTGCTTCCGTT | |
| 347423 | SCAFFOLD | TGACTGCGCCCAGTAGCACCCATGAGCATGCTTTCTGCA | T/C | GAGTCCAAGGAGAAGTCTTTGAGAGCTAATGGAGAGGAG | 200 |
| | 216765_ | CTCTGTTTTGAGCCCCCTCTTTCTTTCAACCCTATTTCC | | CCTCCTCCATCTCAGAACCACCTACAAAACAGAAACTGA | |
| | 5028 | TCACCATTTAAAAAAGTCTTGTAATGTGTATACTTTGAG | | AAATATACTTTCCTTCCTCCGAAGATGCCCTCAGCTTGT | |
| | | AAACCTCCTTCAGTTCTTTCTACTGTAGGCAGGAAACAC | | TCTTCAATGTGTTCAAAGTCAAGAGCACCTGAAGAGTTA | |
| | | ATATATATGAAGCCAACTAAGATTACTCTGACCTGAGTT | | GAGAGAACAGAACTTTAGATGCAGGAAGTTATGGAAATG | |
| | | CTAGAAGTTATAAAGTGAGGAGGCAAAGAACCTAAACCC | | TGCTGCCTGTGAACTTCCCCCCCAAAGAGCCTTGCCTCT | |
| | | AAGGACTAAACCTTTC | | GCTCATGGATTAACCT | |
| 349603 | SCAFFOLD | CAAATGTACATGAAATAAATCATGTTAAAAGCAATGCTA | T/G | GTTCTAAAATCAGGGCTTAATTTATTGCTTTGTTGACTG | 201 |
| | 45055_ | ATAAATATTCAAAACTCAATCGCTTTCTAATTATTTTAG | | TATACTTGGAGGTCACTATGGCCAGTAGGCCAAATTCAA | |
| | 25659 | AACATTCTACTATTATCAAGGTTCTTGGGGCAATTTTTG | | CCTCAAGTTTACTGAATCACAGCTTTTTTTTTTTTTTTT | |
| | | TCTGCTGGGTCTATATGGTGGTAAGACTATAAAATGGCG | | TTTTGACATACTGTTTATGGATGCTTTTGTGCTATAATG | |
| | | TGCTGCTCTACATCTCTTGTCAAACTGGCATTAATCACC | | GCCAAGGTGATTAGCTGCAATAGATACCATATAACCCCA | |
| | | ATATCAACACCATGAAATTGGCTAGGGTGGGAATACTCA | | AAAGCCTGAAGTATTTCCTATCTGACCCTTAGAGAAAGT | |
| | | CATCATGAAACTTGGC | | TTGCTGACCTCTGGCCTA | |
| 350976 | SCAFFOLD | AAGATTTGTGTCATGGATGTCCAACATACTCATTATTTT | A/G | TAAAGACCCCTTAATGCAGGGGAATGCAAAGCACATGGA | 202 |
| | 256426_ | CCAGATTTCCTTTTAGCCTTCTTCCTCTTCTCTGACATC | | CTTTAAACAAAATTTCAACTCTGATACTTTAATTTATGG | |
| | 385 | CCTGGTTGCCAAAAGATCTTCAGTTTGGTAACCATCCAG | | CTGAGTAAATTACTTAATAAATGATCAGTCTCAGTATTA | |
| | | GCACATGCCCTAAATTCTGAAAATATTCTGATCACTAAT | | GGCTCACCATGTTCAATCATGGTTTTAGGTGCTTGGTGC | |
| | | ATATATTACCCCATTCCCCATTTAAGTCTCTTAATGTTA | | ACTTCAATTTATGTAGTTCTCATAACAACCCTCTGAGAA | |
| | | TTGCTTAAAATGCAGTGTTTTTTAAAGAAGCCCTTAATG | | GGTCCTAATTATGACAAGAGAATTGAGACACAGAGAATG | |
| | | TAAGACTGTATGTAAT | | TAAGTTACTTTCCCAG | |
| 343688 | SCAFFOLD | TCCATTTCTAGGGCTTTTTTTTTCCCCAATAGTAACATA | A/G | GGAAAGGGAGAACTGTCCAGAAAGAAGGAAACCTGTGAG | 203 |
| | 70184_ | TGAAGGAATGGGCTGACCTTTAATTTATAATCCTCGTGT | | GTGGAAGAAGTGCTGGAAAACGAACAGGAAGATGATAAA | |
| | 5981 | CACGGAGTTTAGCCGAGCTTAACCTATGTCAGTTGTATT | | GAAAAATTTTTGCAGCACTTTGTAACTGGAGAGCGACCC | |
| | | ATAGTTCAAAATCGTCTGCCTTGCTTAGGAAAAGGCAGG | | CATGGACTGTAGCCGCCAGGCTCCTCTGTCCATGGGATT | |
| | | CTGTGCTTTCAGTGTCAGGTTGAAAAAATATATAAATAA | | CTCCAGACAAGAATACTGGAGTGGATTGCATGCCCTCCT | |
| | | AAAAAGAAACGTGGGAAAATAGACCTTCATTAAAAAAGG | | CCAGGGAATCTTCCCAACCCAGGGATCAGTCCTGGGTCT | |
| | | CAGAGGAAGGCTCCAC | | CCTGCCTTGCAGGCAC | |
| 349988 | SCAFFOLD | GTCTTTATTCACTAGAGATACTTACCTGTAATTTTATTA | T/C | AGACTTTCTATTTCTGCACAATTTAGTCTTAGAAGATTA | 204 |
| | 179015_ | TTTGTAGTGTCTTTGCTTTTTCTATTGGAGTAATGGAAG | | TCTATTTCTAGGAATTTTTACTTTATTCTAGGTTGTCCA | |
| | 1131 | GAGTTTGAAAGTGTTTATCTTCTATATTTTTTGAAAGGT | | GTTTGTTAACTTTATTGATAGTAATCCAATATCATCCTC | |
| | | TTGGGAAGGATAGGTGTTGACTGTTCTGTACTTGTTTGG | | TATATTTCCATGATGTTCTTTGCAATTTTTTGTTGTTCA | |
| | | TGGAATTCTCTCATGAAGCCTTTGGTTCCTATACTTATC | | TTTCTGATTTTATTAGTTGAGCTCTTTTTTTTTTTTTTT | |
| | | TTTATTTGTCGTTTTTGATTACTGATTCAATTTCATTAC | | TTCCTTATGAGGCTTGCCAAAGTTTCATCACTTTTATTT | |
| | | TAGTGATCATTCTGTT | | TTACCAATAGTGGAAG | |
| 352122 | SCAFFOLD | CAATATATTGTCGAAAAACTGTTTGTCTTTATTCACTAG | T/C | TCATTACTAGTGATCATTCTGTTTAGACTTTCTATTCTG | 205 |
| | 179015_ | AGATACTTACCTGTAATTTTATTATTTGTAGTGTCTTGC | | CACAATTTAGTCTTAGAAGATTATCTATTTCTAGGAATT | |
| | 1107 | TTTTTCTATTGGAGTAATGGAAGGAGTTTGAAAGTGTTT | | TTTACTTTATTCTAGGTTGTCCAGTTTGTTAACTTTATT | |
| | | ATCTTCTATATTTTTTGAAAGGTTTGGGAAGGATAGGTG | | GATAGTAATCCAATATCATCCTCTATATTTCCATGATGT | |
| | | TTGACTGTTCTGTACTTGTTTGGTGGAATTCTCTCATGA | | TCTTTGCAATTTTTTGTTGTTCATTTCTGATTTTATTAG | |
| | | AGCCTTTGGTTCCTATACTTATCTTTATTTGTCGTTTTT | | TTGAGCTCTTTTTTTTTTTTTTTTTCCTTATGAGGCTTG | |
| | | GATTACTGATTCAAT | | CCAAAGTTTCATCAC | |

TABLE 8
Additional SNP associated with NFI

| | |
|---|---|
| 343193 | IBISS4snp651 |

(SEQ ID NO: 206)

ACACTGGGGCTCCTTTTGCCTTTTTTAGCAGAACGTCCGTCCATCCATCC
A/GCATCTCTGTCCCGTGACTCAGGGGCACCCACTCAGCTTTGATTCTCC
TCC

| | |
|---|---|
| 343617 | SCAFFOLD35407_3401 |

(SEQ ID NO: 207)

TGCACAAGCAGAAAATGTGGTTCATGTCCTGTTGAATTCTAAATATGTTG
TCTCTGAGATTATCTCTCCTATTTCTTGCCTAATTTATCCATCACAATCC
CCAACATGTTTCTTGGTGGCACTTGGTACCTTGTTCTATATTTATAAAGG
GATCCTTTAATTTTTGTTGTTGTTGTTCAGTCTCTCAGTCATATCTGACT
CTTTGTGACCTCGTGGACTTCAGCACGCCAGGCTTCTTTGTCCACCATCT
T/CCCAGGGCTTGCTCAAACTCATGTCCATTGAGTTGGTAATGCCATTCA
ACTATCTTTTACTCTGTCATCCCCTTCTCCTGCTGCCTTCAATCTTTCCC
AGCAACAGGGCTTTTCTAATGAGTCAGCTCTTCCCATCAGGTGACCAAAG
TACTAGAACTTCAACTTCAGCACCAGTCCTTCCAATGAATATGCAGGACT
GATTTTCTTTAGATTGACTAGTTTGATATCTTTACAGTCCAAGGGACTCT
CAA

| | |
|---|---|
| 343763 | IBISS4snp160 |

(SEQ ID NO: 208)

TTAGATGCCCTGGACAAGGACAGCTCGCCAAAGGATGACACTTGGGACTC
C/TGTGTCGGTCGTGACGTTTCCAGAGAATGAGCAAGAAGGGAGTCCCCA
AAG

| | |
|---|---|
| 344483 | IBISS4snp347 |

(SEQ ID NO: 209)

TATTGCTGGACTTCTGTTGTAACAAGTTGGCAAACACTGGCTGGAACTGG
T/GCTGCAATAAAACATGCCAGTATCAATGCTGACAAGAGCCTAACAAGT
GCC

| | |
|---|---|
| 347069 | IBISS4snp426 |

(SEQ ID NO: 210)

AGAATCTATGAGAGAGATGACTTCAGAGGACAGATGTCAGAGATCACAGA
C/TGATTGTCCCTCTCTTCAAGACCGCTTCCACCTCACTGAGGTTCACTC
CCT

| | |
|---|---|
| 347999 | IBISS4snp723 |

(SEQ ID NO: 211)

TAACATCTCACTATTCTCCTGTGGTCTGATAGAAACAGACACATTCTTTC
A/TAGAGCAGAGCAGTATCCTGTAATCCTAGACCTTTTCATGACACTTGG
AAA

| | |
|---|---|
| 348798 | SCAFFOLD7023_4924 |

(SEQ ID NO: 212)

CTTCATATTTATGGACTAGACAAGTCTTTCTGGGGCAAATATTTATTTTG
AAAAGTGCCACTTGAACAGACAAAATTAACTTATTACCCAGGTGAAAAAG
GACAATACAAGCTTCTTTGGCTTAAAAAAAAGTTGCTGTTAATCTGATTT
TGGATTGCTGAGTTGATTACTGGAGAGGAGATAGGAATTTTTCCTAAGGA
AGAAAGAATTACCTAAGAGGAAAGCTCAACTCTTTCCTTTTTGAGGCTCA
A/GTCTTATAAACACCACTCTGACAGACCAGATCTTTGAAAAGTCCAGTG
ACATAAAGGTCTCCAATGTCCCCAGGGAGGAACTCACTGTGGGAGAAGGT
AGAATTGAACAGGTGAGCAAAGTGAAAGATTAAAGTGGAAGATTGACTTG
GGGAGGCTTCGACATGGGTTATAATTCAGTGAAGACCAGAAATACATATA
AACCCAACCATTTTGGCAAATTGGTTACGGAAGCAAGTAATCATTAAACT
TGA

| | |
|---|---|
| 349583 | SCAFFOLD35711_6569 |

(SEQ ID NO: 213)

GTCCAGATGCCTTGGCAATCCAGAATGCAGTCAAGAATTAAGTAGGAAAA
AATAATCTGAAAAACTCAGTGATTATTCAAAAGTCTGGTTACTAGTATTT
ATGTATTTACTAATACAAGCCCTTGTTTAGCTCTCATGGGTAAAACCTTT
CTTTTGTAAGTTTTTAAAAAGTTGATATTTGGTTTCTCAATCCACAGTAC
AATGGAAAAAGCCTTGAGGGGAGGGGCTAGGGTGGAGGAAGATCTCAGAG
A/GCTACAGAATCTGTTACAGTATTATTACTGGTTATTAGAAAGTAGATT
AAAACCTACCCAAAGTAGGCAATGGAACAAAAACATAGAAATCAGAATCT
ATTTAGCAGGATATCCTATACCTTAGTCATCTTCGGGGAAAATAATCACA
GTATATCGCCTGACAAAAACATAGTAACCAAACAAATTTTAAATAAATGT
TTGCTATATTAAAATAGAACAAAAAGGCTTAGCGTGTGATTTTTCATGTT
TTT

### EXAMPLE 4

[0093] Intramuscular fat is a commercially import trait of cattle that is a prime determinant of the value of a carcass through its surrogate, marbling score. We genotyped pairs of animals of Example 1 for a range of nir fat measurements as described in Example 2. Associations found between DNA markers and intramuscular fat are set out in Table 9.

TABLE 9
Associations between DNA markers and intramuscular fat sorted in
decreasing order of statistical significance.

| Locus | mean_0 | SD | mean_1 | SD | mean_2 | SD | N | Freq | a | k | alpha | tmax | log(1/P) |
|---|---|---|---|---|---|---|---|---|---|---|---|---|---|
| 352076 | 0.18 | 1.68 | −0.13 | 1.42 | −1.75 | 0.63 | 162 | 0.81 | 0.96 | 0.68 | 1.37 | 9.825 | 5.0000 |
| 347422 | 0.18 | 1.70 | −1.51 | 0.55 | 0.00 | 0.00 | 142 | 0.96 | 0.09 | −17.78 | −1.39 | 10.732 | 5.0000 |
| 343362 | 0.14 | 1.61 | −1.52 | 0.75 | 0.00 | 0.00 | 164 | 0.95 | 0.07 | −22.71 | −1.35 | 9.697 | 5.0000 |
| 343054 | 0.47 | 1.83 | 0.05 | 1.32 | −1.03 | 1.24 | 163 | 0.60 | 0.75 | 0.44 | 0.81 | 7.403 | 5.0000 |
| 352376 | 0.23 | 1.70 | −0.49 | 0.78 | −1.31 | 0.96 | 145 | 0.79 | 0.77 | 0.06 | 0.80 | 8.344 | 5.0000 |
| 348950 | 0.00 | 0.00 | −1.45 | 0.45 | 0.09 | 1.63 | 164 | 0.03 | −0.04 | 33.22 | 1.35 | 11.549 | 5.0000 |
| 353833 | −1.31 | 0.90 | 0.12 | 1.81 | 0.24 | 1.50 | 161 | 0.30 | −0.78 | −0.85 | −1.04 | 7.564 | 5.0000 |
| 349339 | −1.31 | 0.88 | 0.56 | 1.75 | 0.05 | 1.53 | 160 | 0.22 | −0.68 | −1.75 | −1.35 | 8.171 | 5.0000 |
| 353331 | −1.17 | 0.89 | 0.65 | 2.21 | −0.13 | 1.27 | 163 | 0.23 | −0.52 | −2.50 | −1.21 | 7.541 | 5.0000 |
| 345497 | 0.00 | 0.00 | −1.41 | 0.60 | 0.12 | 1.64 | 160 | 0.05 | −0.06 | 24.50 | 1.25 | 10.047 | 5.0000 |
| 343610 | 0.00 | 0.00 | −1.60 | 0.87 | 0.13 | 1.60 | 163 | 0.04 | −0.07 | 25.62 | 1.47 | 8.956 | 5.0000 |
| 353107 | 0.18 | 1.68 | −0.16 | 1.41 | −1.75 | 0.63 | 163 | 0.81 | 0.96 | 0.65 | 1.35 | 9.884 | 4.6990 |
| 350939 | 0.00 | 0.00 | −1.02 | 0.85 | 0.15 | 1.67 | 164 | 0.08 | −0.07 | 14.60 | 0.84 | 7.322 | 4.6990 |
| 350910 | 0.00 | 0.00 | −1.53 | 0.81 | 0.13 | 1.62 | 163 | 0.05 | −0.07 | 24.54 | 1.37 | 9.221 | 4.5230 |
| 352223 | 0.22 | 1.63 | −0.74 | 0.94 | −1.77 | 1.02 | 164 | 0.88 | 0.99 | 0.04 | 1.02 | 8.324 | 4.3980 |
| 351771 | 0.19 | 1.75 | 0.33 | 1.35 | −1.06 | 1.30 | 163 | 0.63 | 0.62 | 1.22 | 0.82 | 6.872 | 4.3980 |
| 343786 | −1.26 | 0.90 | 0.29 | 1.89 | 0.09 | 1.53 | 153 | 0.29 | −0.68 | −1.30 | −1.04 | 7.196 | 4.3980 |
| 354364 | 0.10 | 1.60 | −1.49 | 0.90 | 0.00 | 0.00 | 163 | 0.96 | 0.05 | −30.80 | −1.36 | 8.286 | 4.3980 |
| 348335 | −0.91 | 1.19 | −0.33 | 1.26 | 0.52 | 1.79 | 162 | 0.35 | −0.72 | 0.19 | −0.67 | 7.190 | 4.3980 |
| 353963 | 0.08 | 1.61 | −1.69 | 0.62 | 0.00 | 0.00 | 164 | 0.97 | 0.04 | −43.25 | −1.60 | 10.306 | 4.3980 |
| 352880 | 0.00 | 0.00 | −1.30 | 1.01 | 0.17 | 1.60 | 164 | 0.06 | −0.09 | 16.29 | 1.12 | 7.810 | 4.3010 |
| 347009 | −0.28 | 1.36 | 0.57 | 1.84 | −0.88 | 1.13 | 161 | 0.64 | 0.30 | 3.83 | 0.63 | 6.948 | 4.3010 |
| 348491 | 0.67 | 1.82 | −0.56 | 1.49 | −0.45 | 1.02 | 164 | 0.56 | 0.56 | −1.20 | 0.48 | 6.244 | 4.2220 |
| 350037 | 0.00 | 0.00 | −1.31 | 0.78 | 0.10 | 1.63 | 163 | 0.05 | −0.05 | 27.20 | 1.18 | 8.268 | 4.1550 |
| 352656 | −1.10 | 1.10 | 0.07 | 1.67 | 0.30 | 1.58 | 164 | 0.37 | −0.70 | −0.67 | −0.82 | 6.838 | 4.0970 |
| 352655 | −1.10 | 1.10 | 0.07 | 1.67 | 0.30 | 1.58 | 164 | 0.37 | −0.70 | −0.67 | −0.82 | 6.838 | 4.0970 |
| 353195 | 0.19 | 1.65 | −0.95 | 1.12 | 0.00 | 0.00 | 164 | 0.91 | 0.10 | −11.00 | −0.75 | 6.441 | 4.0000 |
| 351385 | 0.07 | 1.60 | −1.91 | 0.59 | 0.00 | 0.00 | 164 | 0.98 | 0.04 | −55.57 | −1.83 | 10.922 | 4.0000 |
| 347674 | −0.92 | 0.91 | 0.16 | 1.80 | 0.31 | 1.60 | 160 | 0.43 | −0.61 | −0.76 | −0.68 | 6.244 | 4.0000 |
| 346418 | 0.17 | 1.64 | −0.26 | 1.42 | −2.35 | 0.66 | 164 | 0.84 | 1.26 | 0.66 | 1.83 | 10.969 | 4.0000 |
| 343414 | 0.22 | 1.52 | 0.02 | 1.79 | −1.45 | 1.07 | 161 | 0.76 | 0.83 | 0.76 | 1.16 | 7.180 | 4.0000 |
| 347642 | −0.79 | 0.91 | −0.78 | 1.16 | 0.42 | 1.72 | 163 | 0.25 | −0.60 | 0.98 | −0.31 | 6.597 | 3.9210 |
| 350008 | 0.34 | 1.84 | −0.21 | 1.34 | −0.86 | 0.90 | 163 | 0.68 | 0.60 | 0.08 | 0.62 | 6.458 | 3.9210 |
| 347715 | −1.51 | 0.66 | −0.16 | 1.77 | 0.18 | 1.59 | 158 | 0.18 | −0.84 | −0.60 | −1.17 | 7.512 | 3.9210 |
| 350575 | 0.00 | 0.00 | −1.42 | 0.46 | 0.06 | 1.63 | 163 | 0.02 | −0.03 | 48.33 | 1.35 | 9.925 | 3.8860 |
| 343818 | −0.96 | 0.49 | −0.53 | 1.22 | 0.28 | 1.76 | 141 | 0.23 | −0.62 | 0.31 | −0.52 | 7.036 | 3.8540 |
| 353087 | 0.00 | 0.00 | −1.27 | 1.04 | 0.17 | 1.62 | 162 | 0.07 | −0.09 | 15.94 | 1.09 | 7.262 | 3.8540 |
| 351586 | 0.13 | 1.63 | −1.23 | 0.95 | 0.00 | 0.00 | 163 | 0.94 | 0.07 | −19.92 | −1.08 | 7.160 | 3.8540 |
| 344851 | −2.29 | 0.78 | −0.61 | 0.97 | 0.13 | 1.61 | 161 | 0.11 | −1.21 | −0.39 | −1.57 | 9.959 | 3.8240 |
| 343536 | 0.39 | 1.73 | 0.05 | 1.59 | −0.84 | 1.13 | 155 | 0.57 | 0.61 | 0.45 | 0.66 | 5.945 | 3.8240 |
| 348212 | 0.00 | 0.00 | −1.24 | 0.80 | 0.13 | 1.64 | 162 | 0.05 | −0.07 | 20.08 | 1.10 | 7.794 | 3.7960 |
| 354084 | −1.34 | 0.98 | 0.16 | 1.90 | 0.16 | 1.48 | 163 | 0.26 | −0.75 | −1.00 | −1.11 | 6.725 | 3.7960 |
| 352521 | −0.99 | 0.99 | −0.42 | 1.38 | 0.38 | 1.74 | 155 | 0.25 | −0.69 | 0.17 | −0.63 | 6.618 | 3.7960 |
| 351679 | −0.90 | 0.85 | 0.33 | 1.78 | 0.07 | 1.63 | 162 | 0.36 | −0.48 | −1.54 | −0.69 | 6.325 | 3.7450 |
| 346888 | −1.79 | 0.72 | −1.11 | 1.14 | 0.18 | 1.61 | 162 | 0.08 | −0.98 | 0.31 | −0.73 | 7.776 | 3.7210 |
| 350825 | −0.77 | 1.18 | −0.41 | 1.31 | 0.45 | 1.74 | 164 | 0.34 | −0.61 | 0.41 | −0.53 | 6.109 | 3.7210 |
| 354170 | −0.01 | 1.60 | −1.58 | 0.37 | 0.00 | 0.00 | 159 | 0.98 | −0.01 | 315.00 | −1.52 | 11.132 | 3.6990 |
| 352674 | −2.35 | 0.66 | −0.24 | 1.53 | 0.14 | 1.60 | 164 | 0.14 | −1.25 | −0.69 | −1.87 | 10.404 | 3.6990 |
| 346417 | −1.55 | 0.81 | 0.18 | 2.11 | 0.07 | 1.38 | 161 | 0.21 | −0.81 | −1.14 | −1.35 | 7.128 | 3.6990 |
| 353461 | 0.16 | 1.65 | −1.22 | 1.06 | 0.00 | 0.00 | 157 | 0.93 | 0.08 | −16.25 | −1.03 | 6.927 | 3.6780 |
| 352384 | −1.16 | 1.20 | −0.02 | 1.50 | 0.26 | 1.66 | 162 | 0.27 | −0.71 | −0.61 | −0.91 | 6.459 | 3.6780 |
| 350574 | −0.90 | 1.71 | 0.56 | 1.68 | −0.06 | 1.38 | 164 | 0.35 | −0.42 | −2.48 | −0.72 | 6.107 | 3.6780 |
| 343824 | 0.10 | 1.54 | 0.19 | 1.73 | −1.30 | 1.11 | 161 | 0.70 | 0.70 | 1.13 | 1.02 | 6.795 | 3.6780 |
| 342814 | 0.07 | 1.60 | −1.52 | 0.85 | 0.00 | 0.00 | 162 | 0.97 | 0.04 | −44.43 | −1.41 | 7.848 | 3.6580 |
| 344028 | −1.70 | 0.59 | −0.88 | 1.39 | 0.17 | 1.60 | 164 | 0.09 | −0.93 | 0.12 | −0.84 | 7.391 | 3.6380 |
| 348372 | 0.00 | 0.00 | −0.87 | 1.28 | 0.22 | 1.63 | 158 | 0.11 | −0.11 | 8.91 | 0.66 | 5.816 | 3.6200 |
| 349762 | −0.68 | 1.25 | 0.04 | 1.30 | 0.50 | 1.91 | 161 | 0.49 | −0.59 | −0.22 | −0.59 | 5.682 | 3.6200 |
| 352680 | 0.32 | 1.65 | −0.41 | 1.35 | −1.20 | 1.28 | 162 | 0.78 | 0.76 | 0.04 | 0.78 | 6.457 | 3.6020 |
| 354324 | 0.50 | 1.75 | −0.18 | 1.59 | −0.66 | 1.11 | 163 | 0.58 | 0.58 | −0.17 | 0.56 | 5.787 | 3.5690 |
| 351608 | 0.54 | 1.61 | 0.00 | 1.63 | −0.65 | 1.43 | 163 | 0.52 | 0.59 | 0.09 | 0.60 | 5.592 | 3.5690 |
| 348758 | 0.15 | 1.62 | 0.33 | 1.67 | −1.11 | 1.33 | 156 | 0.71 | 0.63 | 1.29 | 0.96 | 6.104 | 3.5380 |
| 350947 | −1.30 | 0.53 | −0.09 | 1.67 | 0.16 | 1.64 | 160 | 0.21 | −0.73 | −0.66 | −1.01 | 7.550 | 3.5380 |
| 352361 | −1.16 | 1.09 | 0.24 | 1.81 | 0.03 | 1.42 | 164 | 0.34 | −0.59 | −1.35 | −0.86 | 6.611 | 3.4950 |
| 344319 | 0.26 | 1.67 | −0.04 | 1.49 | −1.05 | 1.20 | 164 | 0.72 | 0.66 | 0.54 | 0.81 | 6.104 | 3.4950 |
| 350281 | −1.89 | 0.52 | −0.76 | 1.50 | 0.24 | 1.58 | 164 | 0.13 | −1.06 | −0.06 | −1.11 | 9.726 | 3.4950 |
| 353897 | −0.76 | 1.26 | 0.41 | 1.64 | 0.03 | 1.67 | 161 | 0.45 | −0.40 | −1.96 | −0.47 | 5.576 | 3.4810 |
| 349269 | 0.77 | 1.76 | −0.16 | 1.65 | −0.47 | 1.21 | 164 | 0.47 | 0.62 | −0.50 | 0.64 | 5.753 | 3.4810 |
| 346008 | −0.84 | 1.14 | 0.35 | 1.62 | 0.01 | 1.71 | 163 | 0.42 | −0.42 | −1.80 | −0.55 | 5.801 | 3.4810 |
| 347206 | −0.97 | 1.03 | −0.49 | 1.07 | 0.38 | 1.81 | 164 | 0.25 | −0.68 | 0.29 | −0.58 | 6.697 | 3.4440 |
| 350424 | −0.84 | 0.93 | 0.29 | 1.46 | 0.11 | 1.87 | 163 | 0.38 | −0.47 | −1.38 | −0.63 | 5.854 | 3.4440 |
| 347075 | −0.70 | 1.56 | −0.02 | 1.49 | 0.57 | 1.69 | 164 | 0.48 | −0.64 | −0.07 | −0.64 | 5.636 | 3.4320 |
| 344554 | 0.10 | 1.60 | −1.65 | 0.98 | 0.00 | 0.00 | 164 | 0.96 | 0.05 | −34.00 | −1.52 | 7.658 | 3.4320 |
| 346154 | −1.39 | 0.62 | 0.81 | 1.83 | −0.16 | 1.51 | 161 | 0.15 | −0.61 | −2.58 | −1.74 | 9.011 | 3.4320 |
| 342909 | 0.17 | 1.61 | −1.06 | 1.15 | 0.00 | 0.00 | 164 | 0.93 | 0.09 | −13.47 | −0.89 | 6.186 | 3.4200 |
| 345719 | 0.38 | 1.71 | −0.10 | 1.67 | −0.75 | 0.93 | 164 | 0.62 | 0.56 | 0.15 | 0.59 | 5.819 | 3.4200 |
| 352287 | 0.16 | 1.60 | −0.78 | 0.83 | −1.63 | 0.90 | 156 | 0.89 | 0.89 | −0.05 | 0.86 | 7.408 | 3.4200 |
| 345309 | −0.78 | 1.26 | 0.31 | 1.72 | 0.41 | 1.56 | 161 | 0.55 | −0.59 | −0.83 | −0.55 | 5.644 | 3.3980 |
| 342572 | −1.24 | 1.34 | 0.37 | 1.88 | 0.02 | 1.44 | 163 | 0.26 | −0.63 | −1.56 | −1.10 | 6.388 | 3.3770 |
| 353697 | 0.30 | 1.50 | 0.40 | 1.55 | −0.72 | 1.44 | 163 | 0.45 | 0.51 | 1.20 | 0.45 | 5.493 | 3.3670 |
| 353169 | 0.17 | 1.59 | −1.25 | 1.04 | −2.20 | 0.82 | 157 | 0.93 | 1.19 | −0.20 | 0.98 | 8.359 | 3.3570 |
| 348656 | 0.07 | 1.64 | −1.24 | 0.70 | 0.00 | 0.00 | 163 | 0.97 | 0.04 | −36.43 | −1.15 | 7.400 | 3.3570 |
| 346905 | −0.88 | 1.31 | −0.11 | 1.29 | 0.35 | 1.78 | 159 | 0.36 | −0.61 | −0.25 | −0.66 | 5.848 | 3.3470 |
| 352931 | 0.00 | 0.00 | −1.51 | 1.10 | 0.11 | 1.60 | 163 | 0.04 | −0.06 | 28.45 | 1.39 | 6.882 | 3.3370 |
| 346584 | −1.56 | 0.30 | −0.99 | 1.06 | 0.17 | 1.64 | 164 | 0.09 | −0.86 | 0.34 | −0.62 | 9.550 | 3.3370 |
| 346520 | −1.25 | 0.56 | −0.45 | 1.39 | 0.23 | 1.76 | 149 | 0.18 | −0.74 | −0.08 | −0.78 | 7.402 | 3.3370 |
| 352000 | 0.13 | 1.59 | −1.68 | 1.16 | 0.00 | 0.00 | 163 | 0.95 | 0.07 | −26.85 | −1.51 | 7.127 | 3.3100 |
| 351213 | −1.09 | 1.30 | 0.22 | 1.60 | 0.16 | 1.61 | 164 | 0.30 | −0.62 | −1.10 | −0.89 | 5.898 | 3.3010 |
| 345544 | −1.07 | 1.12 | 0.14 | 1.63 | 0.15 | 1.62 | 154 | 0.38 | −0.61 | −0.98 | −0.75 | 5.857 | 3.2760 |
| 344969 | −0.65 | 1.20 | 0.35 | 1.89 | 0.57 | 1.46 | 164 | 0.60 | −0.61 | −0.64 | −0.53 | 5.620 | 3.2760 |
| 353680 | −1.03 | 1.11 | 0.17 | 1.44 | 0.19 | 1.74 | 161 | 0.29 | −0.61 | −0.97 | −0.86 | 5.880 | 3.2760 |
| 352213 | −0.16 | 1.09 | 0.56 | 1.86 | −0.54 | 1.40 | 163 | 0.41 | 0.19 | 4.79 | 0.03 | 5.586 | 3.2600 |
| 343542 | 0.13 | 1.66 | −0.30 | 1.36 | −1.65 | 0.71 | 163 | 0.87 | 0.89 | 0.52 | 1.23 | 7.729 | 3.2520 |
| 353584 | −0.19 | 1.63 | 0.40 | 1.66 | −0.85 | 0.60 | 161 | 0.73 | 0.33 | 2.79 | 0.76 | 6.699 | 3.2440 |
| 348323 | 0.09 | 1.62 | −1.37 | 0.86 | 0.00 | 0.00 | 164 | 0.96 | 0.04 | −31.44 | −1.26 | 7.089 | 3.2290 |
| 344636 | −1.84 | 0.62 | 0.33 | 1.98 | −0.02 | 1.50 | 164 | 0.13 | −0.91 | −1.38 | −1.84 | 8.215 | 3.2290 |
| 353436 | −1.27 | 0.87 | −0.29 | 1.85 | 0.19 | 1.47 | 142 | 0.23 | −0.73 | −0.34 | −0.87 | 5.921 | 3.2220 |
| 349668 | 0.45 | 1.78 | −0.03 | 1.48 | −0.66 | 1.33 | 163 | 0.56 | 0.56 | 0.14 | 0.56 | 5.354 | 3.2150 |
| 349644 | −1.09 | 1.30 | 0.22 | 1.60 | 0.16 | 1.61 | 164 | 0.30 | −0.62 | −1.10 | −0.89 | 5.898 | 3.2010 |
| 349469 | −0.53 | 1.17 | −0.62 | 1.07 | 0.46 | 1.84 | 163 | 0.32 | −0.49 | 1.18 | −0.29 | 5.622 | 3.2010 |
| 350456 | −1.09 | 1.30 | 0.18 | 1.60 | 0.14 | 1.61 | 162 | 0.31 | −0.61 | −1.07 | −0.87 | 5.719 | 3.1870 |
| 349388 | 0.09 | 1.50 | −0.16 | 1.96 | −2.44 | 0.42 | 164 | 0.88 | 1.26 | 0.80 | 2.04 | 10.054 | 3.1870 |
| 350400 | 0.18 | 1.63 | −1.00 | 1.22 | 0.00 | 0.00 | 163 | 0.91 | 0.09 | −12.11 | −0.81 | 5.853 | 3.1800 |
| 346040 | 0.13 | 1.68 | −0.19 | 1.48 | −1.37 | 0.43 | 163 | 0.84 | 0.75 | 0.57 | 1.04 | 7.903 | 3.1800 |
| 352386 | 0.14 | 1.62 | −1.18 | 1.13 | 0.00 | 0.00 | 163 | 0.94 | 0.07 | −17.86 | −1.04 | 6.280 | 3.1740 |
| 344286 | −1.13 | 1.15 | −0.05 | 1.12 | 0.19 | 1.76 | 162 | 0.22 | −0.66 | −0.64 | −0.90 | 6.125 | 3.1670 |
| 351811 | 0.17 | 1.63 | −1.00 | 1.22 | 0.00 | 0.00 | 164 | 0.91 | 0.09 | −12.76 | −0.81 | 5.805 | 3.1610 |
| 354030 | 0.00 | 0.00 | −0.92 | 0.99 | 0.14 | 1.65 | 164 | 0.07 | −0.07 | 14.14 | 0.78 | 5.895 | 3.1430 |
| 348202 | −0.86 | 1.03 | 0.26 | 1.91 | 0.12 | 1.44 | 162 | 0.40 | −0.49 | −1.29 | −0.62 | 5.571 | 3.1310 |
| 351492 | 0.14 | 1.64 | −1.01 | 1.11 | 0.00 | 0.00 | 161 | 0.93 | 0.07 | −15.43 | −0.86 | 5.807 | 3.1310 |
| 345154 | 0.13 | 1.61 | 0.17 | 1.57 | −1.09 | 1.30 | 161 | 0.70 | 0.61 | 1.07 | 0.87 | 5.627 | 3.1250 |
| 354499 | −0.44 | 1.17 | −0.03 | 1.85 | 0.81 | 1.58 | 161 | 0.60 | −0.62 | 0.34 | −0.67 | 5.530 | 3.1250 |
| 350377 | 0.33 | 1.63 | −0.03 | 1.80 | −0.78 | 1.00 | 163 | 0.62 | 0.56 | 0.35 | 0.60 | 5.447 | 3.1190 |
| 346166 | 0.57 | 1.69 | 0.00 | 1.50 | −0.69 | 1.60 | 160 | 0.53 | 0.63 | 0.10 | 0.63 | 5.467 | 3.0970 |
| 343943 | 0.38 | 1.72 | −0.45 | 1.32 | −1.00 | 1.14 | 163 | 0.74 | 0.69 | −0.20 | 0.62 | 6.234 | 3.0920 |
| 354350 | 0.23 | 1.71 | −0.29 | 1.31 | −1.46 | 1.03 | 164 | 0.80 | 0.84 | 0.38 | 1.04 | 7.110 | 3.0860 |
| 346701 | 0.08 | 1.64 | −1.08 | 0.77 | 0.00 | 0.00 | 164 | 0.96 | 0.04 | −28.00 | −0.99 | 6.511 | 3.0860 |
| 348725 | −0.82 | 0.86 | 0.28 | 1.49 | 0.08 | 1.86 | 159 | 0.35 | −0.45 | −1.44 | −0.64 | 5.681 | 3.0710 |
| 345797 | 0.08 | 1.65 | −1.05 | 0.76 | 0.00 | 0.00 | 163 | 0.96 | 0.04 | −27.25 | −0.96 | 6.419 | 3.0710 |
| 353046 | −0.76 | 1.40 | 0.23 | 1.35 | 0.36 | 1.81 | 158 | 0.42 | −0.56 | −0.77 | −0.63 | 5.330 | 3.0710 |
| 349071 | −0.43 | 1.44 | 0.06 | 1.68 | 1.08 | 1.47 | 163 | 0.65 | −0.76 | 0.35 | −0.83 | 6.069 | 3.0410 |
| 347100 | −0.23 | 1.15 | −0.34 | 1.64 | 0.93 | 1.96 | 164 | 0.59 | −0.58 | 1.19 | −0.70 | 5.369 | 3.0410 |
| 352332 | 0.00 | 0.00 | −1.44 | 0.96 | 0.12 | 1.61 | 163 | 0.05 | −0.06 | 25.00 | 1.30 | 6.918 | 3.0410 |
| 347705 | 0.42 | 1.69 | −0.03 | 1.72 | −0.65 | 0.95 | 164 | 0.55 | 0.54 | 0.16 | 0.54 | 5.364 | 3.0320 |
| 345203 | −0.32 | 1.63 | 0.97 | 1.97 | −0.19 | 1.03 | 158 | 0.61 | −0.07 | −18.85 | 0.20 | 5.391 | 3.0130 |
| 351244 | 0.00 | 0.00 | −1.02 | 0.91 | 0.08 | 1.65 | 154 | 0.06 | −0.04 | 26.50 | 0.90 | 5.927 | 3.0090 |
| 352119 | 0.12 | 1.65 | −1.02 | 1.02 | 0.00 | 0.00 | 161 | 0.93 | 0.06 | −18.00 | −0.88 | 5.946 | 3.0040 |
| 353547 | −0.96 | 1.58 | 0.04 | 1.56 | 0.35 | 1.55 | 151 | 0.34 | −0.66 | −0.53 | −0.76 | 5.449 | 3.0040 |
| 343827 | −1.28 | 1.28 | −0.40 | 1.47 | 0.29 | 1.62 | 163 | 0.21 | −0.79 | −0.12 | −0.84 | 6.209 | 3.0000 |
| 348058 | 0.02 | 1.51 | 0.25 | 1.86 | −1.13 | 0.93 | 164 | 0.75 | 0.57 | 1.40 | 0.98 | 6.196 | 2.9960 |
| 349306 | −0.96 | 1.25 | −0.08 | 1.79 | 0.31 | 1.49 | 164 | 0.32 | −0.64 | −0.39 | −0.72 | 5.713 | 2.9960 |
| 351077 | 0.44 | 1.80 | −0.21 | 1.47 | −0.64 | 1.21 | 163 | 0.61 | 0.54 | −0.20 | 0.52 | 5.247 | 2.9790 |
| 344033 | 0.78 | 1.77 | −0.58 | 1.47 | −0.02 | 1.59 | 150 | 0.33 | 0.40 | −2.40 | 0.72 | 5.378 | 2.9710 |
| 353944 | −0.50 | 1.42 | 0.35 | 1.71 | 0.00 | 0.00 | 153 | 0.69 | −0.25 | −2.40 | −0.02 | 4.739 | 2.9710 |
| 344673 | −0.98 | 0.56 | 0.18 | 0.97 | 0.00 | 1.78 | 164 | 0.15 | −0.49 | −1.37 | −0.96 | 6.711 | 2.9670 |
| 350425 | −0.80 | 0.90 | 0.24 | 1.49 | 0.08 | 1.86 | 164 | 0.37 | −0.44 | −1.36 | −0.60 | 5.437 | 2.9630 |
| 351471 | 0.00 | 0.00 | −1.56 | 1.20 | 0.12 | 1.60 | 162 | 0.04 | −0.06 | 27.00 | 1.44 | 6.450 | 2.9630 |
| 348726 | 0.08 | 1.86 | 0.24 | 1.49 | −0.80 | 0.90 | 164 | 0.63 | 0.44 | 1.36 | 0.60 | 5.437 | 2.9590 |
| 350827 | −1.27 | 1.08 | −1.55 | 1.05 | 0.21 | 1.60 | 161 | 0.10 | −0.74 | 1.38 | 0.08 | 6.293 | 2.9550 |
| 350404 | 0.10 | 1.59 | 0.07 | 1.62 | −1.61 | 1.04 | 164 | 0.74 | 0.86 | 0.96 | 1.25 | 7.066 | 2.9430 |
| 344814 | −1.40 | 0.69 | −0.25 | 1.56 | 0.17 | 1.65 | 163 | 0.18 | −0.78 | −0.46 | −1.02 | 7.271 | 2.9320 |
| 343861 | 0.12 | 1.64 | −1.07 | 1.14 | 0.00 | 0.00 | 162 | 0.94 | 0.06 | −18.83 | −0.92 | 5.663 | 2.9320 |
| 352920 | 0.08 | 1.86 | 0.24 | 1.49 | −0.80 | 0.90 | 164 | 0.63 | 0.44 | 1.36 | 0.60 | 5.437 | 2.9280 |
| 342874 | −1.91 | 1.19 | −0.70 | 1.30 | 0.27 | 1.61 | 161 | 0.14 | −1.09 | −0.11 | −1.18 | 7.127 | 2.9280 |
| 349580 | −1.69 | 0.22 | 0.58 | 1.44 | −0.06 | 1.63 | 164 | 0.08 | −0.81 | −1.79 | −2.05 | 10.309 | 2.9210 |
| 350161 | −0.58 | 1.25 | 0.00 | 1.51 | 0.51 | 1.91 | 162 | 0.51 | −0.54 | −0.06 | −0.54 | 5.031 | 2.9170 |
| 349442 | −0.72 | 1.15 | −0.24 | 1.40 | 0.38 | 1.80 | 162 | 0.34 | −0.55 | 0.13 | −0.53 | 5.413 | 2.9100 |
| 352177 | 0.00 | 0.00 | −0.91 | 0.87 | 0.13 | 1.71 | 145 | 0.08 | −0.07 | 15.00 | 0.76 | 5.777 | 2.8960 |
| 347915 | −0.68 | 1.55 | 0.16 | 1.60 | 0.41 | 1.54 | 163 | 0.49 | −0.55 | −0.54 | −0.55 | 5.089 | 2.8930 |
| 347760 | −0.20 | 1.12 | −1.28 | 0.94 | 0.16 | 1.64 | 147 | 0.17 | −0.18 | 7.00 | 0.64 | 6.096 | 2.8930 |
| 352426 | −1.04 | 1.16 | −0.19 | 1.41 | 0.26 | 1.71 | 163 | 0.25 | −0.65 | −0.31 | −0.75 | 5.864 | 2.8890 |
| 348518 | 0.31 | 1.56 | 0.00 | 1.80 | −0.76 | 1.11 | 161 | 0.61 | 0.54 | 0.42 | 0.58 | 5.237 | 2.8860 |
| 354395 | 0.23 | 1.49 | 0.19 | 1.84 | −0.86 | 1.22 | 164 | 0.62 | 0.55 | 0.93 | 0.66 | 5.208 | 2.8830 |
| 353918 | −1.04 | 1.16 | −0.19 | 1.41 | 0.24 | 1.71 | 164 | 0.25 | −0.64 | −0.33 | −0.75 | 5.799 | 2.8790 |
| 344998 | 0.91 | 1.36 | 0.17 | 1.71 | −0.52 | 1.42 | 146 | 0.37 | 0.72 | −0.03 | 0.72 | 5.851 | 2.8730 |
| 353335 | −0.96 | 1.05 | −0.38 | 1.28 | 0.33 | 1.76 | 161 | 0.24 | −0.65 | 0.10 | −0.61 | 5.986 | 2.8700 |
| 352427 | 0.06 | 1.53 | 0.13 | 2.01 | −1.69 | 0.49 | 159 | 0.87 | 0.88 | 1.08 | 1.57 | 7.113 | 2.8660 |
| 345016 | −0.52 | 1.30 | 0.01 | 1.48 | 0.73 | 2.04 | 163 | 0.57 | −0.62 | 0.15 | −0.64 | 5.155 | 2.8630 |
| 348760 | −1.08 | 1.33 | 0.17 | 1.61 | 0.16 | 1.60 | 164 | 0.30 | −0.62 | −1.02 | −0.87 | 5.516 | 2.8600 |
| 343384 | 0.18 | 1.60 | −0.36 | 1.48 | −1.85 | 1.04 | 162 | 0.83 | 1.02 | 0.47 | 1.33 | 7.277 | 2.8600 |
| 344020 | 0.00 | 0.00 | −1.76 | 1.05 | 0.09 | 1.61 | 160 | 0.04 | −0.04 | 40.11 | 1.61 | 6.986 | 2.8510 |
| 348445 | −1.10 | 0.52 | −0.48 | 1.23 | 0.25 | 1.75 | 163 | 0.19 | −0.68 | 0.08 | −0.64 | 7.429 | 2.8510 |
| 353479 | −0.65 | 1.26 | 0.18 | 1.60 | 0.56 | 1.90 | 163 | 0.56 | −0.60 | −0.37 | −0.58 | 5.114 | 2.8480 |
| 344738 | 0.00 | 0.00 | −1.76 | 1.05 | 0.09 | 1.61 | 160 | 0.04 | −0.04 | 40.11 | 1.61 | 6.981 | 2.8420 |
| 350818 | 0.43 | 1.89 | −0.09 | 1.29 | −0.61 | 1.35 | 161 | 0.56 | 0.52 | 0.00 | 0.52 | 5.032 | 2.8300 |
| 347635 | 0.34 | 1.50 | −0.05 | 1.64 | −0.86 | 1.57 | 163 | 0.63 | 0.60 | 0.35 | 0.66 | 5.267 | 2.8270 |
| 350386 | −0.62 | 1.38 | −0.12 | 1.32 | 0.65 | 2.10 | 163 | 0.47 | −0.64 | 0.21 | −0.63 | 5.193 | 2.8180 |
| 348421 | −1.17 | 0.93 | −0.04 | 1.62 | 0.16 | 1.61 | 145 | 0.21 | −0.66 | −0.70 | −0.93 | 5.518 | 2.8180 |
| 353211 | 0.55 | 1.73 | −0.68 | 1.30 | 0.16 | 1.73 | 148 | 0.37 | 0.20 | −5.31 | 0.47 | 5.165 | 2.8150 |
| 353020 | −0.67 | 1.36 | 0.27 | 1.75 | 0.42 | 1.59 | 159 | 0.53 | −0.55 | −0.72 | −0.52 | 4.989 | 2.8120 |
| 344073 | −1.20 | 1.42 | −0.10 | 1.49 | 0.22 | 1.62 | 162 | 0.23 | −0.71 | −0.55 | −0.92 | 5.629 | 2.8100 |
| 346122 | 0.05 | 1.62 | −1.75 | 0.82 | 0.00 | 0.00 | 160 | 0.97 | 0.03 | −71.00 | −1.65 | 7.558 | 2.7990 |
| 351538 | 0.18 | 1.63 | −0.86 | 1.25 | −1.69 | 0.67 | 158 | 0.88 | 0.93 | −0.11 | 0.85 | 7.905 | 2.7990 |
| 344342 | 0.08 | 1.86 | 0.24 | 1.49 | −0.79 | 0.91 | 163 | 0.64 | 0.43 | 1.37 | 0.60 | 5.299 | 2.7930 |
| 351772 | −0.80 | 1.79 | 0.32 | 1.46 | 0.21 | 1.47 | 164 | 0.47 | −0.51 | −1.22 | −0.54 | 5.039 | 2.7900 |
| 354108 | 0.00 | 0.00 | −1.75 | 0.82 | 0.06 | 1.61 | 164 | 0.03 | −0.03 | 59.33 | 1.65 | 7.596 | 2.7880 |
| 354008 | −1.31 | 1.37 | −0.45 | 1.40 | 0.24 | 1.61 | 164 | 0.17 | −0.78 | −0.11 | −0.83 | 5.726 | 2.7720 |
| 349347 | 0.16 | 1.65 | −0.71 | 1.31 | −1.58 | 0.07 | 163 | 0.90 | 0.87 | 0.00 | 0.87 | 10.331 | 2.7700 |
| 352088 | 0.08 | 1.61 | −1.50 | 0.91 | 0.00 | 0.00 | 163 | 0.97 | 0.04 | −38.50 | −1.41 | 6.785 | 2.7700 |
| 348232 | 0.00 | 0.00 | −1.03 | 1.02 | 0.11 | 1.64 | 164 | 0.06 | −0.06 | 19.73 | 0.90 | 5.696 | 2.7670 |
| 346676 | 0.00 | 0.00 | −0.79 | 1.27 | 0.16 | 1.62 | 162 | 0.10 | −0.08 | 10.88 | 0.61 | 4.958 | 2.7640 |
| 348353 | 0.08 | 1.60 | −1.62 | 1.00 | 0.00 | 0.00 | 164 | 0.97 | 0.04 | −41.50 | −1.53 | 6.728 | 2.7640 |
| 348231 | 0.00 | 0.00 | −1.03 | 1.02 | 0.11 | 1.64 | 164 | 0.06 | −0.06 | 19.73 | 0.90 | 5.696 | 2.7640 |
| 352928 | −0.10 | 1.54 | 0.51 | 1.74 | −0.52 | 1.39 | 163 | 0.50 | 0.21 | 3.90 | 0.20 | 4.879 | 2.7540 |
| 352149 | 0.25 | 1.68 | 0.17 | 1.63 | −0.80 | 1.30 | 162 | 0.58 | 0.53 | 0.85 | 0.59 | 5.005 | 2.7520 |
| 349571 | 0.65 | 2.10 | −0.12 | 1.32 | −0.57 | 1.38 | 164 | 0.52 | 0.61 | −0.26 | 0.60 | 5.037 | 2.7520 |
| 354476 | 0.75 | 1.36 | 0.14 | 1.85 | −0.38 | 1.22 | 130 | 0.47 | 0.56 | −0.08 | 0.57 | 4.992 | 2.7450 |
| 342939 | 0.29 | 1.78 | −0.21 | 1.42 | −0.89 | 0.97 | 161 | 0.71 | 0.59 | 0.15 | 0.63 | 5.706 | 2.7420 |
| 343882 | 0.00 | 0.00 | −1.89 | 0.42 | 0.06 | 1.61 | 161 | 0.01 | −0.03 | 64.00 | 1.84 | 11.084 | 2.7400 |
| 349265 | −0.40 | 1.21 | −0.15 | 1.59 | 0.87 | 1.96 | 163 | 0.56 | −0.64 | 0.61 | −0.68 | 5.164 | 2.7380 |
| 350229 | 0.38 | 1.59 | −0.01 | 1.74 | −0.67 | 1.19 | 164 | 0.56 | 0.53 | 0.26 | 0.54 | 5.059 | 2.7380 |
| 346006 | 0.00 | 0.00 | −1.75 | 0.82 | 0.06 | 1.63 | 160 | 0.03 | −0.03 | 59.33 | 1.65 | 7.566 | 2.7280 |
| 348673 | 0.00 | 0.00 | −0.76 | 0.61 | 0.07 | 1.68 | 164 | 0.05 | −0.04 | 22.71 | 0.67 | 5.661 | 2.7240 |
| 344070 | −0.47 | 1.15 | −0.05 | 1.81 | 0.60 | 1.51 | 161 | 0.52 | −0.53 | 0.21 | −0.54 | 5.080 | 2.7210 |
| 347434 | 0.57 | 1.79 | −0.20 | 1.71 | −0.44 | 0.92 | 164 | 0.53 | 0.51 | −0.52 | 0.49 | 4.964 | 2.7140 |
| 347385 | −0.66 | 1.27 | −0.09 | 1.62 | 0.39 | 1.69 | 159 | 0.43 | −0.53 | −0.09 | −0.53 | 4.987 | 2.7120 |
| 354346 | 0.06 | 1.43 | −0.50 | 1.37 | 1.09 | 2.21 | 164 | 0.65 | −0.52 | 2.09 | −0.84 | 5.406 | 2.7080 |
| 348636 | 0.05 | 1.63 | −1.51 | 0.58 | 0.00 | 0.00 | 164 | 0.98 | 0.03 | −61.40 | −1.44 | 8.176 | 2.7030 |
| 342599 | 0.00 | 0.00 | −1.77 | 1.26 | 0.12 | 1.58 | 163 | 0.04 | −0.06 | 30.50 | 1.61 | 6.371 | 2.7030 |
| 346674 | 0.38 | 1.59 | −0.01 | 1.74 | −0.67 | 1.19 | 164 | 0.56 | 0.53 | 0.26 | 0.54 | 5.059 | 2.7010 |
| 353784 | 0.41 | 1.65 | −0.08 | 1.45 | −0.63 | 1.35 | 148 | 0.53 | 0.52 | 0.06 | 0.52 | 4.895 | 2.6930 |
| 344298 | −1.07 | 0.99 | −0.32 | 1.88 | 0.29 | 1.62 | 154 | 0.23 | −0.68 | −0.10 | −0.72 | 5.359 | 2.6900 |
| 350943 | 0.29 | 1.58 | −0.32 | 1.62 | −0.83 | 1.21 | 156 | 0.69 | 0.56 | −0.09 | 0.54 | 5.087 | 2.6820 |
| 350677 | −0.65 | 1.42 | 0.39 | 1.74 | 0.07 | 1.33 | 161 | 0.57 | −0.36 | −1.89 | −0.27 | 5.007 | 2.6720 |
| 348383 | −0.58 | 1.45 | −0.07 | 1.49 | 0.52 | 1.78 | 159 | 0.44 | −0.55 | 0.07 | −0.55 | 4.922 | 2.6720 |
| 353070 | −1.49 | 0.86 | −0.02 | 1.89 | 0.20 | 1.49 | 153 | 0.22 | −0.84 | −0.74 | −1.20 | 6.733 | 2.6680 |
| 351278 | 2.62 | 0.41 | 0.00 | 0.00 | −0.11 | 1.55 | 150 | 0.02 | 1.36 | −0.92 | 2.56 | 14.297 | 2.6580 |
| 344428 | 0.34 | 1.67 | −0.24 | 1.45 | −0.90 | 1.43 | 163 | 0.71 | 0.62 | 0.06 | 0.64 | 5.327 | 2.6580 |
| 354036 | −0.94 | 0.81 | −0.06 | 1.70 | 0.18 | 1.64 | 164 | 0.27 | −0.56 | −0.57 | −0.71 | 5.605 | 2.6540 |
| 353891 | 0.00 | 0.00 | −0.77 | 0.63 | 0.07 | 1.68 | 163 | 0.05 | −0.04 | 23.00 | 0.69 | 5.536 | 2.6440 |
| 348151 | 0.16 | 1.55 | −0.04 | 1.73 | −1.29 | 1.12 | 164 | 0.77 | 0.72 | 0.72 | 1.00 | 5.936 | 2.6380 |
| 350535 | −1.52 | 0.89 | −0.32 | 1.91 | 0.16 | 1.54 | 163 | 0.14 | −0.84 | −0.43 | −1.10 | 5.874 | 2.6380 |
| 347681 | −1.60 | 1.06 | −0.62 | 1.10 | 0.17 | 1.67 | 159 | 0.11 | −0.89 | −0.11 | −0.96 | 6.305 | 2.6350 |
| 348040 | −0.22 | 1.10 | −0.34 | 1.68 | 0.74 | 1.91 | 164 | 0.55 | −0.48 | 1.25 | −0.54 | 4.852 | 2.6330 |
| 348152 | −1.29 | 1.12 | −0.04 | 1.73 | 0.16 | 1.55 | 164 | 0.23 | −0.72 | −0.72 | −1.00 | 5.936 | 2.6290 |
| 346369 | −1.05 | 1.49 | 0.26 | 1.76 | 0.05 | 1.44 | 164 | 0.33 | −0.55 | −1.38 | −0.81 | 5.385 | 2.6270 |
| 350228 | −0.67 | 1.19 | −0.01 | 1.74 | 0.36 | 1.60 | 163 | 0.44 | −0.52 | −0.28 | −0.53 | 4.966 | 2.6250 |
| 344787 | 0.11 | 1.55 | 0.04 | 1.82 | −1.21 | 0.86 | 164 | 0.78 | 0.66 | 0.89 | 0.99 | 5.835 | 2.6200 |
| 346313 | 0.16 | 1.55 | −0.04 | 1.73 | −1.29 | 1.12 | 164 | 0.77 | 0.72 | 0.72 | 1.00 | 5.936 | 2.6160 |
| 349144 | −1.44 | 0.52 | −0.43 | 1.37 | 0.16 | 1.67 | 164 | 0.14 | −0.80 | −0.26 | −0.95 | 7.690 | 2.6130 |
| 347188 | 0.17 | 1.56 | −0.04 | 1.73 | −1.29 | 1.12 | 163 | 0.76 | 0.73 | 0.71 | 1.00 | 5.960 | 2.6090 |
| 347933 | 0.00 | 0.00 | −0.96 | 0.84 | 0.09 | 1.69 | 155 | 0.05 | −0.04 | 22.33 | 0.87 | 5.620 | 2.6090 |
| 345764 | −0.68 | 1.37 | 0.17 | 1.64 | 0.44 | 1.67 | 164 | 0.54 | −0.56 | −0.52 | −0.54 | 4.938 | 2.6060 |
| 348039 | 0.74 | 1.91 | −0.34 | 1.68 | −0.22 | 1.10 | 163 | 0.45 | 0.48 | −1.25 | 0.54 | 4.842 | 2.6040 |
| 344576 | −1.35 | 1.17 | 0.01 | 1.69 | 0.16 | 1.54 | 164 | 0.28 | −0.76 | −0.80 | −1.02 | 6.074 | 2.6020 |
| 344501 | −0.77 | 1.05 | 0.02 | 1.67 | 0.26 | 1.70 | 161 | 0.36 | −0.52 | −0.53 | −0.59 | 5.028 | 2.5950 |
| 344268 | 0.79 | 1.85 | 0.03 | 1.54 | −0.46 | 1.46 | 164 | 0.41 | 0.62 | −0.22 | 0.65 | 5.045 | 2.5900 |
| 352564 | 0.39 | 1.79 | −0.18 | 1.37 | −0.71 | 1.43 | 163 | 0.63 | 0.55 | −0.04 | 0.54 | 4.997 | 2.5880 |
| 353929 | −0.56 | 1.10 | −0.11 | 1.87 | 0.42 | 1.35 | 156 | 0.46 | −0.49 | 0.08 | −0.49 | 4.884 | 2.5870 |
| 352051 | 0.35 | 1.68 | −0.18 | 1.69 | −0.87 | 1.12 | 153 | 0.72 | 0.61 | 0.13 | 0.65 | 5.055 | 2.5850 |
| 347050 | −0.90 | 0.97 | 0.20 | 1.90 | 0.09 | 1.49 | 159 | 0.32 | −0.49 | −1.22 | −0.71 | 5.247 | 2.5850 |
| 351998 | −0.45 | 1.56 | 0.02 | 1.50 | 0.70 | 1.77 | 163 | 0.59 | −0.57 | 0.18 | −0.59 | 4.899 | 2.5830 |
| 343273 | −0.30 | 1.49 | 0.54 | 1.73 | 0.00 | 0.00 | 162 | 0.82 | −0.15 | −4.60 | 0.30 | 4.364 | 2.5830 |
| 346192 | 0.00 | 0.00 | −1.65 | 1.20 | 0.08 | 1.59 | 162 | 0.03 | −0.04 | 42.25 | 1.55 | 6.088 | 2.5820 |
| 345765 | −0.68 | 1.37 | 0.17 | 1.64 | 0.44 | 1.67 | 164 | 0.54 | −0.56 | −0.52 | −0.54 | 4.938 | 2.5780 |
| 347866 | −1.41 | 0.96 | −0.92 | 1.28 | 0.21 | 1.62 | 164 | 0.11 | −0.81 | 0.40 | −0.56 | 6.091 | 2.5750 |
| 344061 | 0.12 | 1.65 | −0.91 | 1.07 | 0.00 | 0.00 | 163 | 0.94 | 0.06 | −16.17 | −0.79 | 5.213 | 2.5650 |
| 344916 | 0.00 | 0.00 | −0.83 | 0.92 | 0.11 | 1.67 | 162 | 0.07 | −0.06 | 16.09 | 0.70 | 5.203 | 2.5640 |
| 348149 | 0.24 | 1.63 | −0.83 | 1.35 | −1.15 | 0.36 | 163 | 0.87 | 0.69 | −0.54 | 0.41 | 7.386 | 2.5640 |
| 349197 | −0.80 | 0.94 | −0.18 | 1.63 | 0.29 | 1.70 | 158 | 0.28 | −0.55 | −0.14 | −0.58 | 5.240 | 2.5620 |
| 343085 | 0.00 | 0.00 | −1.45 | 1.03 | 0.08 | 1.61 | 164 | 0.04 | −0.04 | 37.25 | 1.34 | 6.188 | 2.5620 |
| 352342 | 0.38 | 1.74 | −0.35 | 1.36 | −0.66 | 1.14 | 150 | 0.63 | 0.52 | −0.40 | 0.46 | 5.043 | 2.5620 |
| 345043 | 0.66 | 1.54 | 0.28 | 1.59 | −0.49 | 1.56 | 163 | 0.35 | 0.57 | 0.34 | 0.52 | 5.025 | 2.5580 |
| 353221 | −0.78 | 1.34 | −0.30 | 1.60 | 0.45 | 1.63 | 138 | 0.31 | −0.61 | 0.22 | −0.56 | 5.030 | 2.5540 |
| 346914 | 0.00 | 0.00 | −0.78 | 1.33 | 0.17 | 1.65 | 162 | 0.10 | −0.09 | 10.18 | 0.60 | 4.694 | 2.5540 |
| 347684 | 0.66 | 1.49 | 0.20 | 1.60 | −0.46 | 1.58 | 159 | 0.36 | 0.56 | 0.18 | 0.53 | 4.936 | 2.5530 |
| 352986 | −0.55 | 0.95 | 0.80 | 1.82 | −0.20 | 1.57 | 158 | 0.21 | −0.18 | −6.71 | −0.87 | 5.550 | 2.5510 |
| 346380 | 0.00 | 0.00 | −1.39 | 1.20 | 0.10 | 1.62 | 161 | 0.04 | −0.05 | 28.80 | 1.28 | 5.708 | 2.5420 |
| 350385 | −0.95 | 0.80 | −0.61 | 1.23 | 0.30 | 1.73 | 162 | 0.19 | −0.62 | 0.46 | −0.45 | 6.085 | 2.5390 |
| 343966 | 0.01 | 1.67 | 0.41 | 1.76 | −0.69 | 1.22 | 146 | 0.62 | 0.35 | 2.14 | 0.53 | 4.855 | 2.5390 |
| 346001 | 0.12 | 1.62 | −1.07 | 1.24 | 0.00 | 0.00 | 164 | 0.94 | 0.06 | −18.83 | −0.93 | 5.215 | 2.5380 |
| 349814 | 0.21 | 1.63 | −0.03 | 1.68 | −0.91 | 0.96 | 164 | 0.68 | 0.56 | 0.57 | 0.67 | 5.459 | 2.5360 |
| 349594 | 0.31 | 1.71 | −0.16 | 1.46 | −0.81 | 1.36 | 163 | 0.68 | 0.56 | 0.16 | 0.59 | 5.066 | 2.5360 |
| 351373 | 0.21 | 1.63 | −0.03 | 1.68 | −0.91 | 0.96 | 164 | 0.68 | 0.56 | 0.57 | 0.67 | 5.459 | 2.5320 |
| 351612 | 0.00 | 0.00 | −1.32 | 1.11 | 0.09 | 1.61 | 164 | 0.04 | −0.04 | 30.33 | 1.22 | 5.741 | 2.5230 |
| 349970 | 0.00 | 0.00 | −0.91 | 1.20 | 0.11 | 1.65 | 161 | 0.07 | −0.06 | 17.55 | 0.78 | 4.923 | 2.5200 |
| 349822 | 0.25 | 1.80 | −0.36 | 1.24 | −1.00 | 0.78 | 162 | 0.78 | 0.62 | 0.02 | 0.63 | 6.187 | 2.5190 |
| 345005 | 0.10 | 1.69 | −0.74 | 0.80 | 0.00 | 0.00 | 162 | 0.94 | 0.05 | −15.80 | −0.64 | 5.119 | 2.5160 |
| 352695 | 0.12 | 1.59 | −1.57 | 1.30 | 0.00 | 0.00 | 163 | 0.95 | 0.06 | −27.17 | −1.42 | 5.782 | 2.5140 |
| 354175 | −0.84 | 0.87 | 0.19 | 1.74 | 0.13 | 1.66 | 149 | 0.41 | −0.48 | −1.12 | −0.58 | 5.014 | 2.5130 |
| 347884 | −0.51 | 1.35 | 0.24 | 1.51 | 0.59 | 1.92 | 164 | 0.60 | −0.55 | −0.36 | −0.51 | 4.768 | 2.5070 |
| 348693 | 0.11 | 1.59 | −1.73 | 1.20 | 0.00 | 0.00 | 162 | 0.97 | 0.06 | −32.45 | −1.61 | 6.214 | 2.5020 |
| 346314 | 0.15 | 1.66 | −0.73 | 1.20 | 0.00 | 0.00 | 163 | 0.90 | 0.07 | −10.73 | −0.57 | 4.679 | 2.4980 |
| 349256 | 0.47 | 1.50 | −0.03 | 1.76 | −0.54 | 1.44 | 157 | 0.50 | 0.51 | 0.01 | 0.51 | 4.681 | 2.4960 |
| 343858 | 0.21 | 1.44 | 0.36 | 1.56 | −0.62 | 1.51 | 158 | 0.46 | 0.41 | 1.36 | 0.37 | 4.708 | 2.4960 |
| 349547 | 0.00 | 0.00 | −1.43 | 0.74 | 0.07 | 1.63 | 163 | 0.03 | −0.04 | 41.86 | 1.33 | 6.861 | 2.4950 |
| 347424 | 0.48 | 1.78 | −0.10 | 1.48 | −0.58 | 1.45 | 163 | 0.56 | 0.53 | −0.09 | 0.52 | 4.816 | 2.4850 |
| 350557 | 0.13 | 1.65 | −0.26 | 1.47 | −1.65 | 0.81 | 164 | 0.86 | 0.89 | 0.56 | 1.25 | 6.973 | 2.4840 |
| 352232 | −0.81 | 1.34 | 0.27 | 1.63 | 0.18 | 1.64 | 160 | 0.35 | −0.49 | −1.18 | −0.67 | 4.801 | 2.4790 |
| 343112 | −1.44 | 1.22 | −0.49 | 1.57 | 0.19 | 1.60 | 162 | 0.13 | −0.81 | −0.17 | −0.91 | 5.415 | 2.4790 |
| 353148 | −0.96 | 1.59 | 0.00 | 1.52 | 0.26 | 1.62 | 164 | 0.34 | −0.61 | −0.57 | −0.73 | 5.060 | 2.4760 |
| 352360 | 0.00 | 0.00 | −1.02 | 0.69 | 0.05 | 1.65 | 163 | 0.03 | −0.03 | 41.80 | 0.96 | 5.964 | 2.4750 |
| 353346 | 0.15 | 1.72 | −0.84 | 0.99 | 0.00 | 0.00 | 152 | 0.93 | 0.07 | −12.20 | −0.71 | 5.046 | 2.4720 |
| 353923 | −0.64 | 1.23 | −0.03 | 1.66 | 0.38 | 1.68 | 164 | 0.44 | −0.51 | −0.20 | −0.52 | 4.843 | 2.4670 |
| 343386 | −1.38 | 0.95 | −0.63 | 1.43 | 0.17 | 1.62 | 164 | 0.12 | −0.77 | 0.03 | −0.76 | 5.759 | 2.4570 |
| 347533 | −0.35 | 1.08 | 0.55 | 2.03 | −0.40 | 1.31 | 161 | 0.49 | 0.03 | 37.00 | 0.00 | 4.651 | 2.4530 |
| 343173 | −0.46 | 1.29 | 0.54 | 1.90 | −0.31 | 1.19 | 162 | 0.61 | −0.08 | −12.33 | 0.12 | 4.870 | 2.4530 |
| 348065 | 0.20 | 1.68 | −1.29 | 1.13 | −0.48 | 0.72 | 150 | 0.89 | 0.34 | −3.38 | −0.56 | 6.239 | 2.4530 |
| 349672 | 0.00 | 0.00 | −0.89 | 0.86 | 0.07 | 1.66 | 163 | 0.05 | −0.04 | 26.43 | 0.80 | 5.209 | 2.4520 |
| 344596 | −0.35 | 1.62 | 0.67 | 1.72 | −0.18 | 1.21 | 159 | 0.63 | −0.08 | −11.00 | 0.15 | 4.785 | 2.4500 |
| 353126 | −0.01 | 1.35 | 0.38 | 1.87 | −0.97 | 1.67 | 164 | 0.70 | 0.48 | 1.81 | 0.84 | 5.047 | 2.4490 |
| 349614 | −1.13 | 0.15 | −1.30 | 0.91 | 0.09 | 1.58 | 162 | 0.06 | −0.61 | 1.28 | 0.07 | 8.270 | 2.4490 |
| 348104 | −1.37 | 0.40 | 0.11 | 1.71 | −0.01 | 1.60 | 164 | 0.18 | −0.68 | −1.18 | −1.19 | 7.549 | 2.4350 |
| 352804 | −0.74 | 0.94 | −0.36 | 1.01 | 0.22 | 1.81 | 163 | 0.22 | −0.48 | 0.21 | −0.42 | 5.126 | 2.4340 |
| 354536 | −1.03 | 1.02 | 0.34 | 1.71 | 0.00 | 1.60 | 159 | 0.23 | −0.52 | −1.66 | −0.97 | 5.706 | 2.4340 |
| 349305 | −0.48 | 0.88 | 0.55 | 1.83 | −0.33 | 1.49 | 163 | 0.31 | −0.07 | −12.73 | −0.43 | 5.182 | 2.4330 |
| 345430 | −1.14 | 0.67 | −0.40 | 1.24 | 0.22 | 1.75 | 164 | 0.19 | −0.68 | −0.09 | −0.72 | 6.632 | 2.4330 |
| 351977 | 0.11 | 1.71 | 0.00 | 1.14 | −1.19 | 0.98 | 138 | 0.85 | 0.65 | 0.83 | 1.03 | 5.224 | 2.4320 |
| 344874 | −0.76 | 0.85 | −0.17 | 1.76 | 0.27 | 1.60 | 164 | 0.30 | −0.52 | −0.15 | −0.54 | 5.186 | 2.4260 |
| 354494 | −1.06 | 1.05 | 0.23 | 1.91 | 0.10 | 1.59 | 151 | 0.25 | −0.58 | −1.22 | −0.94 | 5.209 | 2.4200 |
| 351995 | 0.60 | 1.84 | 0.09 | 1.65 | −0.51 | 1.29 | 164 | 0.43 | 0.55 | 0.08 | 0.55 | 4.722 | 2.4190 |
| 351507 | 0.05 | 1.73 | 0.29 | 1.77 | −0.64 | 0.87 | 163 | 0.56 | 0.35 | 1.70 | 0.41 | 4.668 | 2.4160 |
| 352888 | −0.67 | 1.46 | 0.33 | 1.66 | 0.10 | 1.59 | 164 | 0.42 | −0.39 | −1.60 | −0.48 | 4.636 | 2.4090 |
| 350881 | −0.15 | 1.52 | 0.18 | 1.76 | 2.86 | 1.14 | 164 | 0.89 | −1.50 | 0.78 | −2.41 | 7.760 | 2.4080 |
| 351110 | −1.77 | 0.56 | −0.71 | 1.80 | 0.12 | 1.52 | 159 | 0.10 | −0.95 | −0.12 | −1.04 | 6.736 | 2.4070 |
| 348166 | −0.43 | 1.16 | −0.14 | 1.62 | 0.55 | 1.89 | 164 | 0.51 | −0.49 | 0.41 | −0.49 | 4.541 | 2.4070 |
| 351834 | 0.07 | 1.22 | 0.34 | 1.94 | −0.62 | 1.39 | 163 | 0.52 | 0.34 | 1.78 | 0.36 | 4.619 | 2.4030 |
| 349618 | −1.14 | 0.62 | 0.32 | 1.86 | −0.03 | 1.58 | 162 | 0.15 | −0.55 | −1.63 | −1.19 | 6.024 | 2.4030 |
| 349013 | 0.23 | 1.80 | −0.23 | 1.41 | −0.75 | 0.68 | 164 | 0.74 | 0.49 | 0.06 | 0.50 | 5.385 | 2.3950 |
| 354228 | 0.20 | 1.41 | 0.41 | 1.55 | −0.82 | 1.83 | 151 | 0.66 | 0.51 | 1.41 | 0.73 | 4.819 | 2.3950 |
| 344165 | −0.78 | 1.03 | −0.12 | 1.65 | 0.22 | 1.63 | 156 | 0.35 | −0.50 | −0.32 | −0.55 | 4.860 | 2.3890 |
| 349942 | 0.05 | 1.65 | −0.90 | 0.54 | 0.00 | 0.00 | 164 | 0.96 | 0.03 | −37.00 | −0.83 | 5.999 | 2.3880 |
| 351869 | −0.86 | 1.19 | −0.10 | 1.43 | 0.26 | 1.81 | 162 | 0.33 | −0.56 | −0.36 | −0.63 | 5.093 | 2.3830 |
| 348888 | 0.22 | 1.70 | −0.03 | 1.57 | −1.17 | 1.09 | 164 | 0.65 | 0.69 | 0.64 | 0.83 | 5.799 | 2.3830 |
| 348462 | 0.26 | 1.70 | −0.36 | 1.39 | −1.00 | 1.12 | 162 | 0.78 | 0.63 | 0.02 | 0.64 | 5.407 | 2.3830 |
| 349735 | −1.08 | 1.00 | 0.81 | 1.86 | −0.18 | 1.51 | 162 | 0.15 | −0.45 | −3.20 | −1.46 | 6.360 | 2.3820 |
| 347806 | 0.00 | 0.00 | −0.96 | 1.15 | 0.10 | 1.64 | 164 | 0.05 | −0.05 | 20.20 | 0.85 | 4.945 | 2.3820 |
| 345359 | −0.48 | 1.11 | −0.18 | 1.31 | 0.48 | 2.06 | 164 | 0.45 | −0.48 | 0.38 | −0.46 | 4.643 | 2.3730 |
| 343979 | −0.86 | 0.69 | −0.29 | 1.56 | 0.18 | 1.68 | 162 | 0.22 | −0.52 | −0.10 | −0.55 | 5.262 | 2.3730 |
| 347440 | −0.40 | 1.15 | 0.47 | 1.75 | −0.47 | 1.52 | 164 | 0.45 | 0.03 | 25.86 | −0.05 | 4.694 | 2.3690 |
| 353222 | 0.47 | 1.62 | −0.07 | 1.74 | −0.48 | 1.18 | 159 | 0.48 | 0.47 | −0.14 | 0.48 | 4.527 | 2.3650 |
| 349717 | −0.53 | 1.17 | 0.23 | 1.64 | 0.52 | 1.95 | 162 | 0.57 | −0.53 | −0.45 | −0.49 | 4.564 | 2.3610 |
| 350617 | −1.06 | 1.06 | −0.17 | 1.68 | 0.21 | 1.60 | 163 | 0.25 | −0.64 | −0.40 | −0.76 | 5.479 | 2.3580 |
| 345930 | −0.46 | 1.46 | 0.01 | 1.55 | 0.79 | 1.88 | 161 | 0.60 | −0.62 | 0.25 | −0.66 | 4.866 | 2.3570 |
| 353905 | −1.98 | 0.50 | −0.38 | 1.84 | 0.07 | 1.55 | 161 | 0.09 | −1.02 | −0.56 | −1.50 | 7.236 | 2.3550 |
| 345048 | 0.08 | 1.63 | −1.17 | 0.97 | 0.00 | 0.00 | 163 | 0.95 | 0.04 | −30.25 | −1.06 | 5.481 | 2.3540 |
| 353573 | −0.68 | 1.36 | −0.24 | 1.43 | 0.38 | 1.75 | 163 | 0.34 | −0.53 | 0.17 | −0.50 | 4.836 | 2.3540 |
| 349673 | 0.00 | 0.00 | −0.80 | 0.86 | 0.07 | 1.67 | 164 | 0.05 | −0.04 | 23.86 | 0.71 | 4.979 | 2.3500 |
| 346157 | 2.73 | 1.17 | −0.28 | 1.24 | 0.00 | 1.71 | 164 | 0.18 | 1.36 | −1.21 | 2.42 | 8.236 | 2.3500 |
| 354153 | 0.22 | 1.68 | −0.20 | 1.62 | −0.83 | 0.94 | 164 | 0.75 | 0.53 | 0.20 | 0.58 | 4.838 | 2.3430 |
| 345586 | −0.86 | 0.83 | −0.23 | 1.86 | 0.24 | 1.52 | 163 | 0.26 | −0.55 | −0.15 | −0.59 | 5.273 | 2.3370 |
| 343487 | 0.11 | 1.65 | −0.85 | 1.11 | 0.00 | 0.00 | 164 | 0.93 | 0.06 | −16.45 | −0.73 | 4.772 | 2.3350 |
| 342907 | 0.29 | 1.66 | −0.50 | 1.35 | −1.10 | 1.29 | 160 | 0.80 | 0.70 | −0.14 | 0.64 | 5.361 | 2.3340 |
| 343403 | 0.94 | 1.87 | −0.31 | 1.27 | −0.33 | 1.63 | 131 | 0.41 | 0.64 | −0.97 | 0.74 | 4.704 | 2.3330 |
| 352421 | −0.87 | 1.06 | −0.14 | 1.48 | 0.16 | 1.65 | 160 | 0.32 | −0.52 | −0.42 | −0.59 | 5.029 | 2.3330 |
| 349751 | −0.74 | 1.06 | 0.25 | 1.79 | 0.04 | 1.60 | 158 | 0.39 | −0.39 | −1.54 | −0.53 | 4.781 | 2.3320 |
| 346635 | −1.59 | 0.12 | −1.02 | 1.03 | 0.07 | 1.62 | 161 | 0.05 | −0.83 | 0.31 | −0.59 | 7.635 | 2.3290 |
| 347231 | −0.85 | 1.40 | −0.02 | 1.70 | 0.24 | 1.57 | 156 | 0.33 | −0.54 | −0.52 | −0.64 | 4.682 | 2.3270 |
| 342547 | 0.00 | 0.00 | −0.80 | 1.24 | 0.16 | 1.67 | 134 | 0.10 | −0.08 | 11.00 | 0.63 | 4.513 | 2.3260 |
| 349258 | −0.83 | 0.94 | −0.24 | 1.66 | 0.27 | 1.67 | 157 | 0.25 | −0.55 | −0.07 | −0.57 | 4.889 | 2.3250 |
| 347326 | 0.05 | 1.60 | 0.00 | 0.00 | −1.84 | 0.91 | 164 | 0.96 | 0.95 | 0.95 | 1.77 | 6.795 | 2.3240 |
| 343688 | −1.22 | 1.26 | −1.08 | 1.10 | 0.29 | 1.62 | 160 | 0.14 | −0.76 | 0.81 | −0.31 | 5.489 | 2.3230 |
| 350637 | 0.05 | 1.65 | −0.95 | 0.55 | 0.00 | 0.00 | 164 | 0.96 | 0.03 | −39.00 | −0.88 | 6.000 | 2.3160 |
| 349966 | −0.44 | 1.44 | −0.02 | 1.54 | 0.59 | 1.82 | 164 | 0.55 | −0.52 | 0.18 | −0.52 | 4.550 | 2.3120 |
| 344729 | 0.09 | 1.67 | 0.23 | 1.73 | −0.71 | 1.02 | 164 | 0.55 | 0.40 | 1.35 | 0.45 | 4.607 | 2.3120 |
| 353250 | 0.06 | 1.50 | −0.01 | 1.92 | −2.07 | 0.90 | 163 | 0.86 | 1.06 | 0.93 | 1.77 | 6.980 | 2.3090 |
| 351265 | 0.37 | 1.86 | −0.25 | 1.39 | −0.69 | 1.11 | 155 | 0.69 | 0.53 | −0.17 | 0.50 | 4.940 | 2.3080 |
| 351316 | 0.13 | 1.60 | 0.06 | 1.75 | −0.95 | 1.04 | 163 | 0.71 | 0.54 | 0.87 | 0.74 | 5.008 | 2.3050 |
| 354068 | 0.17 | 1.57 | −0.10 | 1.85 | −0.95 | 0.77 | 160 | 0.76 | 0.56 | 0.52 | 0.71 | 5.205 | 2.3030 |
| 349875 | −0.43 | 1.44 | 0.42 | 1.75 | 0.90 | 1.50 | 164 | 0.73 | −0.67 | −0.28 | −0.58 | 5.086 | 2.2990 |
| 344805 | −1.42 | 1.02 | −0.88 | 1.11 | 0.18 | 1.64 | 162 | 0.10 | −0.80 | 0.33 | −0.59 | 5.649 | 2.2980 |
| 353521 | 0.23 | 1.79 | −0.09 | 1.29 | −0.89 | 1.25 | 160 | 0.74 | 0.56 | 0.43 | 0.68 | 4.979 | 2.2950 |
| 345188 | 0.35 | 1.87 | 0.00 | 0.00 | −0.37 | 1.20 | 154 | 0.53 | 0.36 | 0.03 | 0.36 | 4.046 | 2.2880 |
| 351548 | 0.00 | 0.00 | −1.07 | 1.04 | 0.07 | 1.63 | 164 | 0.04 | −0.04 | 31.57 | 0.98 | 5.083 | 2.2870 |
| 352912 | −1.20 | 0.93 | 0.13 | 1.98 | 0.08 | 1.55 | 150 | 0.21 | −0.64 | −1.08 | −1.04 | 5.141 | 2.2870 |
| 348573 | 0.50 | 1.71 | 0.00 | 0.00 | −0.27 | 1.51 | 163 | 0.34 | 0.39 | −0.30 | 0.42 | 4.036 | 2.2840 |
| 352208 | 0.04 | 1.53 | 0.31 | 2.01 | −1.44 | 0.85 | 144 | 0.85 | 0.74 | 1.36 | 1.44 | 5.964 | 2.2790 |
| 348753 | 0.19 | 1.74 | −0.81 | 1.13 | 0.00 | 0.00 | 141 | 0.92 | 0.10 | −9.53 | −0.66 | 4.646 | 2.2770 |
| 351603 | −0.47 | 1.25 | 0.14 | 1.73 | 0.63 | 1.89 | 163 | 0.61 | −0.55 | −0.11 | −0.54 | 4.542 | 2.2720 |
| 353209 | 0.10 | 1.63 | −1.39 | 0.89 | −1.26 | 0.45 | 164 | 0.95 | 0.68 | −1.19 | −0.05 | 6.507 | 2.2710 |
| 344344 | −0.52 | 1.45 | −0.16 | 1.24 | 0.49 | 1.85 | 147 | 0.44 | −0.51 | 0.29 | −0.49 | 4.497 | 2.2690 |
| 349919 | 0.12 | 1.68 | −0.72 | 1.12 | 0.00 | 0.00 | 162 | 0.92 | 0.06 | −13.00 | −0.59 | 4.486 | 2.2690 |
| 347248 | −0.45 | 1.07 | 0.48 | 1.76 | −0.19 | 1.72 | 161 | 0.47 | −0.13 | −6.15 | −0.18 | 4.462 | 2.2640 |
| 352103 | 0.11 | 1.67 | 0.00 | 0.00 | −0.72 | 0.95 | 162 | 0.87 | 0.41 | 0.73 | 0.64 | 4.635 | 2.2610 |
| 344847 | −1.05 | 0.88 | −0.37 | 1.53 | 0.19 | 1.66 | 162 | 0.19 | −0.62 | −0.10 | −0.66 | 5.465 | 2.2600 |
| 347291 | 0.21 | 1.53 | −0.38 | 1.99 | −1.06 | 0.78 | 163 | 0.82 | 0.64 | 0.07 | 0.66 | 5.104 | 2.2570 |
| 354317 | 0.50 | 1.72 | 0.04 | 1.63 | −0.53 | 1.42 | 158 | 0.44 | 0.52 | 0.11 | 0.51 | 4.508 | 2.2540 |
| 352932 | 0.15 | 1.62 | 0.07 | 1.60 | −1.08 | 1.38 | 164 | 0.71 | 0.61 | 0.87 | 0.84 | 5.054 | 2.2500 |
| 346988 | 0.00 | 0.00 | −0.74 | 1.27 | 0.13 | 1.65 | 164 | 0.09 | −0.07 | 12.38 | 0.60 | 4.372 | 2.2460 |
| 353421 | 0.21 | 1.67 | −0.04 | 1.65 | −0.91 | 1.06 | 160 | 0.70 | 0.56 | 0.55 | 0.68 | 5.102 | 2.2440 |
| 344698 | −0.11 | 1.51 | 0.57 | 1.93 | −1.05 | 1.08 | 163 | 0.83 | 0.47 | 2.45 | 1.24 | 5.589 | 2.2430 |
| 352458 | 0.00 | 0.00 | 0.40 | 1.86 | −0.34 | 1.31 | 158 | 0.22 | 0.17 | 3.35 | −0.15 | 3.948 | 2.2410 |
| 342957 | 0.17 | 1.66 | −0.28 | 1.55 | −1.19 | 0.90 | 163 | 0.81 | 0.68 | 0.34 | 0.82 | 5.738 | 2.2410 |
| 347227 | 0.41 | 1.84 | −0.28 | 1.51 | −0.48 | 1.02 | 164 | 0.61 | 0.44 | −0.55 | 0.39 | 4.514 | 2.2400 |
| 350468 | −0.90 | 0.52 | −0.19 | 1.62 | 0.16 | 1.66 | 164 | 0.22 | −0.53 | −0.34 | −0.63 | 5.638 | 2.2360 |
| 345974 | −0.93 | 0.84 | −0.61 | 1.20 | 0.30 | 1.73 | 164 | 0.19 | −0.61 | 0.48 | −0.43 | 5.756 | 2.2340 |
| 343714 | −1.06 | 0.92 | 0.00 | 0.00 | 0.06 | 1.65 | 162 | 0.07 | −0.56 | −0.89 | −0.99 | 5.133 | 2.2340 |
| 344679 | 0.00 | 0.00 | −1.68 | 1.01 | 0.06 | 1.61 | 163 | 0.02 | −0.03 | 57.00 | 1.61 | 6.085 | 2.2340 |
| 343947 | 0.29 | 1.79 | −0.01 | 1.46 | −0.88 | 1.50 | 147 | 0.69 | 0.58 | 0.49 | 0.70 | 4.697 | 2.2280 |
| 347761 | −0.14 | 1.70 | 0.55 | 1.78 | −0.41 | 0.75 | 163 | 0.69 | 0.13 | 6.11 | 0.45 | 4.592 | 2.2250 |
| 344702 | 0.14 | 1.67 | −0.29 | 1.58 | −0.86 | 0.69 | 160 | 0.78 | 0.50 | 0.14 | 0.54 | 4.998 | 2.2150 |
| 350638 | −0.75 | 1.07 | 0.24 | 1.66 | −0.04 | 1.67 | 164 | 0.36 | −0.35 | −1.79 | −0.54 | 4.787 | 2.2130 |
| 346308 | 0.14 | 1.69 | −0.62 | 1.21 | 0.00 | 0.00 | 164 | 0.88 | 0.07 | −9.86 | −0.46 | 4.155 | 2.2110 |
| 346575 | 0.15 | 1.60 | −0.19 | 1.63 | −1.66 | 1.26 | 161 | 0.85 | 0.90 | 0.62 | 1.31 | 5.694 | 2.2100 |
| 347113 | −0.04 | 1.67 | 0.24 | 1.66 | −0.75 | 1.07 | 164 | 0.64 | 0.35 | 1.79 | 0.54 | 4.787 | 2.2090 |
| 354375 | −0.83 | 0.94 | −0.16 | 1.63 | 0.21 | 1.69 | 162 | 0.25 | −0.52 | −0.29 | −0.60 | 4.735 | 2.2080 |
| 351503 | −0.89 | 0.83 | −0.24 | 1.82 | 0.24 | 1.52 | 164 | 0.26 | −0.56 | −0.15 | −0.61 | 5.317 | 2.2040 |
| 344242 | 0.28 | 1.67 | −0.14 | 1.57 | −0.77 | 1.32 | 161 | 0.68 | 0.53 | 0.20 | 0.56 | 4.716 | 2.2020 |
| 350057 | 0.54 | 1.89 | −0.04 | 1.63 | −0.46 | 1.14 | 159 | 0.51 | 0.50 | −0.16 | 0.50 | 4.480 | 2.2000 |
| 346870 | −0.22 | 1.54 | −0.40 | 1.35 | 0.55 | 1.81 | 163 | 0.46 | −0.39 | 1.47 | −0.34 | 4.422 | 2.1970 |
| 346467 | 0.19 | 1.72 | −0.36 | 1.24 | −0.92 | 1.07 | 164 | 0.81 | 0.56 | 0.01 | 0.56 | 4.964 | 2.1970 |
| 352828 | 0.39 | 1.84 | −0.12 | 1.44 | −0.57 | 1.36 | 163 | 0.59 | 0.48 | −0.06 | 0.47 | 4.485 | 2.1970 |
| 348766 | 0.05 | 1.72 | 0.60 | 1.21 | −0.76 | 1.00 | 158 | 0.86 | 0.41 | 2.36 | 1.09 | 5.111 | 2.1970 |
| 344568 | 0.07 | 1.63 | −1.19 | 1.08 | 0.00 | 0.00 | 164 | 0.96 | 0.04 | −35.00 | −1.09 | 5.125 | 2.1960 |
| 345024 | 0.35 | 1.73 | −0.11 | 1.66 | −0.59 | 1.09 | 159 | 0.62 | 0.47 | 0.02 | 0.47 | 4.576 | 2.1950 |
| 347818 | 0.19 | 1.65 | −1.17 | 1.34 | −0.83 | 0.70 | 155 | 0.89 | 0.51 | −1.67 | −0.16 | 5.475 | 2.1940 |
| 343584 | 0.16 | 1.62 | −0.17 | 1.55 | −1.42 | 1.27 | 164 | 0.82 | 0.79 | 0.58 | 1.08 | 5.488 | 2.1920 |
| 344655 | 1.04 | 1.72 | −0.26 | 1.42 | −0.09 | 1.66 | 163 | 0.31 | 0.57 | −1.30 | 0.84 | 4.856 | 2.1890 |
| 346809 | 0.18 | 1.60 | −1.56 | 1.28 | −1.13 | 0.54 | 158 | 0.94 | 0.65 | −1.66 | −0.29 | 6.322 | 2.1890 |
| 354353 | 0.51 | 1.73 | −0.07 | 1.71 | −0.45 | 1.32 | 159 | 0.50 | 0.48 | −0.21 | 0.48 | 4.345 | 2.1880 |
| 348228 | 0.10 | 1.52 | −0.07 | 1.88 | −1.84 | 0.99 | 163 | 0.85 | 0.97 | 0.82 | 1.53 | 6.354 | 2.1840 |
| 352966 | −0.18 | 1.60 | 0.80 | 1.54 | 0.00 | 0.00 | 164 | 0.91 | −0.09 | −9.89 | 0.63 | 4.231 | 2.1820 |
| 348933 | 0.00 | 1.77 | 0.39 | 1.14 | −0.54 | 0.77 | 164 | 0.81 | 0.27 | 2.44 | 0.68 | 4.760 | 2.1820 |
| 346587 | 0.20 | 1.57 | −0.29 | 1.85 | −0.98 | 0.95 | 162 | 0.79 | 0.59 | 0.17 | 0.65 | 4.906 | 2.1800 |
| 352387 | 0.30 | 1.55 | 0.02 | 1.75 | −0.88 | 1.17 | 135 | 0.68 | 0.59 | 0.53 | 0.70 | 4.591 | 2.1790 |
| 354213 | 0.22 | 1.85 | −0.35 | 1.16 | −0.70 | 0.69 | 162 | 0.77 | 0.46 | −0.24 | 0.40 | 5.137 | 2.1770 |
| 349413 | 0.14 | 1.58 | 0.05 | 1.75 | −0.92 | 1.11 | 164 | 0.71 | 0.53 | 0.83 | 0.72 | 4.848 | 2.1770 |
| 350451 | −0.31 | 1.39 | 0.00 | 0.00 | 0.41 | 1.80 | 163 | 0.57 | −0.36 | 0.14 | −0.37 | 3.932 | 2.1760 |
| 350348 | −0.29 | 1.56 | −0.35 | 1.26 | 0.65 | 1.92 | 151 | 0.54 | −0.47 | 1.13 | −0.52 | 4.360 | 2.1750 |
| 348940 | 0.07 | 1.63 | −1.19 | 1.08 | 0.00 | 0.00 | 163 | 0.96 | 0.04 | −35.00 | −1.09 | 5.094 | 2.1740 |
| 343982 | 0.12 | 1.71 | −0.02 | 1.67 | −1.03 | 0.74 | 153 | 0.74 | 0.57 | 0.76 | 0.78 | 5.466 | 2.1720 |
| 346260 | 0.07 | 1.63 | −1.19 | 1.08 | 0.00 | 0.00 | 164 | 0.96 | 0.04 | −35.00 | −1.09 | 5.125 | 2.1710 |
| 344950 | 0.14 | 1.62 | 0.00 | 0.00 | −0.81 | 1.45 | 162 | 0.83 | 0.48 | 0.71 | 0.70 | 4.269 | 2.1700 |
| 353131 | 0.41 | 1.70 | −0.14 | 1.67 | −0.52 | 1.30 | 162 | 0.57 | 0.46 | −0.18 | 0.45 | 4.405 | 2.1690 |
| 350773 | −0.62 | 1.46 | −0.23 | 1.48 | 0.39 | 1.71 | 163 | 0.36 | −0.51 | 0.23 | −0.47 | 4.520 | 2.1640 |
| 345050 | 0.22 | 1.76 | 0.10 | 1.54 | −0.71 | 1.28 | 163 | 0.61 | 0.46 | 0.74 | 0.54 | 4.412 | 2.1640 |
| 342822 | −0.44 | 1.37 | 0.60 | 1.95 | −0.17 | 1.20 | 155 | 0.65 | −0.14 | −6.70 | 0.15 | 4.635 | 2.1620 |
| 347228 | 0.43 | 1.86 | −0.36 | 1.49 | −0.46 | 1.02 | 161 | 0.61 | 0.45 | −0.78 | 0.37 | 4.427 | 2.1620 |
| 351815 | −0.73 | 0.65 | 0.00 | 0.00 | 0.05 | 1.69 | 159 | 0.08 | −0.39 | −0.87 | −0.67 | 4.868 | 2.1590 |
| 350759 | 0.46 | 1.70 | −0.37 | 1.47 | −0.50 | 1.48 | 161 | 0.62 | 0.48 | −0.73 | 0.40 | 4.417 | 2.1580 |
| 352407 | −0.63 | 1.46 | 0.28 | 1.88 | 0.11 | 1.25 | 164 | 0.47 | −0.37 | −1.46 | −0.41 | 4.359 | 2.1560 |
| 352334 | −0.61 | 1.17 | 0.01 | 1.66 | 0.35 | 1.74 | 157 | 0.42 | −0.48 | −0.29 | −0.50 | 4.485 | 2.1520 |
| 342901 | 0.10 | 1.69 | −0.02 | 1.67 | −1.03 | 0.74 | 157 | 0.75 | 0.57 | 0.79 | 0.78 | 5.395 | 2.1460 |
| 354028 | −0.64 | 1.15 | 0.31 | 1.62 | −0.05 | 1.71 | 164 | 0.36 | −0.29 | −2.22 | −0.48 | 4.543 | 2.1460 |
| 347158 | 0.47 | 1.56 | 0.05 | 1.42 | −0.52 | 1.79 | 156 | 0.45 | 0.49 | 0.15 | 0.49 | 4.376 | 2.1430 |
| 353491 | 0.27 | 1.74 | −0.37 | 1.50 | −0.84 | 0.66 | 143 | 0.78 | 0.55 | −0.15 | 0.51 | 5.331 | 2.1400 |
| 344932 | −0.55 | 1.37 | 0.37 | 1.85 | 0.11 | 1.46 | 162 | 0.52 | −0.33 | −1.79 | −0.30 | 4.323 | 2.1400 |
| 353863 | 0.17 | 1.43 | −0.06 | 2.11 | −1.34 | 1.33 | 162 | 0.81 | 0.76 | 0.70 | 1.08 | 4.930 | 2.1340 |
| 346945 | 0.05 | 1.66 | −0.83 | 0.62 | 0.00 | 0.00 | 162 | 0.96 | 0.03 | −34.20 | −0.77 | 5.215 | 2.1330 |
| 353009 | −0.57 | 1.44 | −0.20 | 1.54 | 0.38 | 1.70 | 161 | 0.39 | −0.47 | 0.22 | −0.45 | 4.375 | 2.1320 |
| 345473 | −1.63 | 0.40 | 0.06 | 1.81 | 0.01 | 1.59 | 161 | 0.11 | −0.82 | −1.06 | −1.50 | 6.959 | 2.1300 |
| 346419 | −0.87 | 0.77 | −0.04 | 1.62 | 0.14 | 1.69 | 164 | 0.28 | −0.51 | −0.64 | −0.65 | 5.118 | 2.1290 |
| 350446 | 0.06 | 1.62 | −0.67 | 1.05 | 0.00 | 0.00 | 164 | 0.91 | 0.03 | −23.33 | −0.54 | 4.191 | 2.1260 |
| 352587 | 0.24 | 1.66 | −0.84 | 1.01 | −2.05 | 0.70 | 164 | 0.88 | 1.15 | 0.06 | 1.19 | 8.493 | 2.1240 |
| 348912 | −0.01 | 1.73 | 0.26 | 1.17 | −0.85 | 0.78 | 162 | 0.86 | 0.42 | 1.64 | 0.92 | 5.141 | 2.1220 |
| 348625 | −1.12 | 0.50 | −0.82 | 1.06 | 0.13 | 1.67 | 163 | 0.09 | −0.62 | 0.52 | −0.36 | 6.061 | 2.1200 |
| 347384 | −0.43 | 1.49 | −0.02 | 1.57 | 0.78 | 1.86 | 146 | 0.62 | −0.60 | 0.32 | −0.65 | 4.513 | 2.1190 |
| 350542 | −1.86 | 0.88 | −0.66 | 1.12 | 0.18 | 1.66 | 164 | 0.11 | −1.02 | −0.18 | −1.16 | 6.938 | 2.1160 |
| 349070 | −0.20 | 1.72 | 0.09 | 1.37 | 1.44 | 1.18 | 162 | 0.78 | −0.82 | 0.65 | −1.12 | 5.815 | 2.1130 |
| 353215 | 0.43 | 1.55 | −0.08 | 1.66 | −0.57 | 1.48 | 164 | 0.56 | 0.50 | −0.02 | 0.50 | 4.451 | 2.1110 |
| 353840 | 0.80 | 1.41 | 0.28 | 1.80 | −0.43 | 1.39 | 164 | 0.30 | 0.61 | 0.15 | 0.58 | 4.911 | 2.1060 |
| 353031 | −0.92 | 0.89 | −0.37 | 1.48 | 0.28 | 1.62 | 150 | 0.27 | −0.60 | 0.08 | −0.58 | 5.412 | 2.1060 |
| 346304 | −0.68 | 1.02 | −0.32 | 1.52 | 0.40 | 1.85 | 146 | 0.32 | −0.54 | 0.33 | −0.47 | 4.828 | 2.1060 |
| 350276 | 0.05 | 1.61 | −1.77 | 0.98 | 0.00 | 0.00 | 161 | 0.98 | 0.03 | −71.80 | −1.70 | 6.131 | 2.1040 |
| 346298 | −1.16 | 0.50 | −0.04 | 1.60 | 0.03 | 1.61 | 158 | 0.17 | −0.59 | −0.88 | −0.94 | 5.884 | 2.1020 |
| 351893 | −0.19 | 1.59 | −0.02 | 1.61 | 1.20 | 1.48 | 163 | 0.75 | −0.69 | 0.76 | −0.95 | 5.032 | 2.1010 |
| 344373 | 0.28 | 1.85 | −0.20 | 1.26 | −0.67 | 1.17 | 158 | 0.71 | 0.48 | −0.01 | 0.47 | 4.564 | 2.0990 |
| 352053 | 0.00 | 0.00 | −0.64 | 1.28 | 0.15 | 1.66 | 164 | 0.10 | −0.07 | 9.53 | 0.49 | 4.089 | 2.0950 |
| 345762 | −1.59 | 0.12 | −0.80 | 1.38 | 0.07 | 1.62 | 163 | 0.06 | −0.83 | 0.05 | −0.79 | 7.244 | 2.0940 |
| 349103 | −0.87 | 0.77 | −0.07 | 1.63 | 0.14 | 1.69 | 163 | 0.28 | −0.51 | −0.58 | −0.64 | 5.099 | 2.0930 |
| 352323 | −0.46 | 1.44 | 0.10 | 1.64 | 0.62 | 1.72 | 161 | 0.61 | −0.54 | −0.04 | −0.54 | 4.468 | 2.0920 |
| 351310 | 0.02 | 1.63 | −1.13 | 0.32 | 0.00 | 0.00 | 159 | 0.98 | 0.01 | −114.00 | −1.09 | 7.870 | 2.0920 |
| 344465 | 1.38 | 1.69 | 0.17 | 1.78 | −0.23 | 1.49 | 129 | 0.33 | 0.80 | −0.50 | 0.94 | 4.984 | 2.0920 |
| 349048 | 0.06 | 1.63 | −0.86 | 0.86 | 0.00 | 0.00 | 157 | 0.95 | 0.03 | −29.67 | −0.77 | 4.737 | 2.0910 |
| 350254 | 0.39 | 1.83 | −0.16 | 1.58 | −0.51 | 1.06 | 163 | 0.60 | 0.45 | −0.22 | 0.43 | 4.390 | 2.0900 |
| 353084 | −2.05 | 0.70 | −0.83 | 1.05 | 0.21 | 1.65 | 164 | 0.11 | −1.13 | −0.08 | −1.20 | 8.289 | 2.0900 |
| 353496 | 0.36 | 1.77 | −0.16 | 1.34 | −0.86 | 1.45 | 140 | 0.74 | 0.61 | 0.15 | 0.65 | 4.658 | 2.0890 |
| 352532 | −0.40 | 1.34 | −0.02 | 1.62 | 0.57 | 1.86 | 164 | 0.57 | −0.48 | 0.22 | −0.50 | 4.294 | 2.0870 |
| 351762 | 0.14 | 1.60 | −0.86 | 1.47 | 0.00 | 0.00 | 164 | 0.92 | 0.07 | −13.29 | −0.72 | 4.248 | 2.0860 |
| 345252 | −0.53 | 1.16 | 0.24 | 1.65 | 0.46 | 1.97 | 164 | 0.57 | −0.49 | −0.56 | −0.46 | 4.305 | 2.0850 |
| 353416 | −0.94 | 0.71 | 0.27 | 1.52 | 0.06 | 1.84 | 131 | 0.21 | −0.50 | −1.42 | −0.91 | 5.316 | 2.0850 |
| 346615 | −0.84 | 0.99 | −0.57 | 1.59 | 0.32 | 1.61 | 163 | 0.21 | −0.58 | 0.53 | −0.40 | 5.037 | 2.0810 |
| 348528 | 0.00 | 0.00 | −0.84 | 1.34 | 0.12 | 1.64 | 161 | 0.08 | −0.06 | 15.00 | 0.69 | 4.261 | 2.0800 |
| 348154 | −0.57 | 1.19 | −0.08 | 1.67 | 0.33 | 1.70 | 164 | 0.41 | −0.45 | −0.09 | −0.46 | 4.372 | 2.0790 |
| 347665 | 0.27 | 1.66 | −0.40 | 1.47 | −1.26 | 1.08 | 162 | 0.80 | 0.77 | 0.12 | 0.82 | 5.703 | 2.0790 |
| 351212 | 0.11 | 1.63 | −0.92 | 1.12 | 0.00 | 0.00 | 160 | 0.94 | 0.06 | −17.73 | −0.80 | 4.539 | 2.0770 |
| 348215 | 0.31 | 1.86 | 0.03 | 1.59 | −0.57 | 1.03 | 164 | 0.58 | 0.44 | 0.36 | 0.46 | 4.289 | 2.0770 |
| 354281 | 0.40 | 1.65 | 0.00 | 1.64 | −0.57 | 1.50 | 157 | 0.56 | 0.48 | 0.18 | 0.50 | 4.304 | 2.0750 |
| 348201 | −0.07 | 1.66 | 0.55 | 1.59 | −0.68 | 0.79 | 161 | 0.86 | 0.31 | 3.03 | 0.97 | 4.901 | 2.0720 |
| 342867 | 0.14 | 1.54 | 0.05 | 1.78 | −1.17 | 1.21 | 157 | 0.74 | 0.66 | 0.86 | 0.92 | 5.115 | 2.0720 |
| 351675 | −0.61 | 1.60 | 0.40 | 1.86 | 0.07 | 1.43 | 155 | 0.40 | −0.34 | −1.97 | −0.47 | 4.288 | 2.0710 |
| 349730 | 0.13 | 1.55 | −0.45 | 1.98 | −1.65 | 0.96 | 164 | 0.90 | 0.89 | 0.35 | 1.14 | 5.127 | 2.0570 |
| 350739 | −0.68 | 0.79 | 0.55 | 1.59 | −0.08 | 1.65 | 163 | 0.14 | −0.30 | −3.10 | −0.97 | 4.909 | 2.0570 |
| 347606 | −0.99 | 1.73 | −0.01 | 1.52 | 0.19 | 1.57 | 162 | 0.30 | −0.59 | −0.66 | −0.75 | 4.565 | 2.0570 |
| 349777 | 0.43 | 1.87 | −0.33 | 1.46 | −0.47 | 1.13 | 163 | 0.58 | 0.45 | −0.69 | 0.40 | 4.326 | 2.0560 |
| 346705 | 0.08 | 1.68 | −0.71 | 0.99 | 0.00 | 0.00 | 162 | 0.93 | 0.04 | −18.75 | −0.61 | 4.270 | 2.0550 |
| 353927 | 0.23 | 1.63 | 0.03 | 1.62 | −0.85 | 1.41 | 163 | 0.64 | 0.54 | 0.63 | 0.63 | 4.591 | 2.0540 |
| 345229 | 0.55 | 1.88 | 0.24 | 1.48 | −0.60 | 1.52 | 162 | 0.39 | 0.57 | 0.46 | 0.51 | 4.429 | 2.0540 |
| 343365 | 0.11 | 1.47 | 0.13 | 2.03 | −1.04 | 1.12 | 157 | 0.76 | 0.58 | 1.03 | 0.88 | 4.575 | 2.0540 |
| 350091 | −0.50 | 1.21 | 0.07 | 1.72 | 0.44 | 1.82 | 161 | 0.53 | −0.47 | −0.21 | −0.46 | 4.227 | 2.0530 |
| 348155 | −0.57 | 1.19 | −0.08 | 1.68 | 0.33 | 1.70 | 163 | 0.40 | −0.45 | −0.09 | −0.46 | 4.347 | 2.0520 |
| 352560 | −1.38 | 0.37 | −0.61 | 1.02 | 0.11 | 1.69 | 159 | 0.08 | −0.74 | −0.03 | −0.77 | 7.345 | 2.0510 |
| 353575 | 0.25 | 1.65 | −0.48 | 1.38 | −0.99 | 1.35 | 164 | 0.80 | 0.62 | −0.18 | 0.55 | 4.774 | 2.0460 |
| 352524 | −1.51 | 0.37 | −0.25 | 1.85 | 0.08 | 1.57 | 164 | 0.12 | −0.80 | −0.58 | −1.15 | 6.862 | 2.0450 |
| 349152 | −0.81 | 0.93 | −0.04 | 1.94 | 0.27 | 1.48 | 143 | 0.28 | −0.54 | −0.43 | −0.64 | 4.693 | 2.0430 |
| 350072 | 0.26 | 1.66 | 0.07 | 1.63 | −0.67 | 1.40 | 163 | 0.57 | 0.47 | 0.59 | 0.51 | 4.299 | 2.0390 |
| 347218 | 0.49 | 1.84 | −0.45 | 1.29 | −0.18 | 1.49 | 161 | 0.58 | 0.33 | −1.81 | 0.23 | 4.301 | 2.0390 |
| 353817 | 0.21 | 1.55 | −0.07 | 1.83 | −0.78 | 1.08 | 164 | 0.70 | 0.49 | 0.43 | 0.58 | 4.595 | 2.0340 |
| 352337 | −0.99 | 1.59 | −0.17 | 1.67 | 0.26 | 1.54 | 163 | 0.26 | −0.62 | −0.31 | −0.72 | 4.662 | 2.0320 |
| 344120 | 0.19 | 1.58 | 0.02 | 1.77 | −0.89 | 1.05 | 144 | 0.66 | 0.54 | 0.69 | 0.66 | 4.752 | 2.0320 |
| 349153 | 0.53 | 1.77 | −0.40 | 1.37 | −0.39 | 1.48 | 164 | 0.60 | 0.46 | −1.02 | 0.37 | 4.325 | 2.0280 |
| 349345 | 0.12 | 1.63 | −0.70 | 1.40 | 0.00 | 0.00 | 163 | 0.91 | 0.06 | −12.67 | −0.56 | 4.004 | 2.0270 |
| 353791 | 0.29 | 1.70 | −0.60 | 1.13 | −1.18 | 1.46 | 148 | 0.85 | 0.73 | −0.21 | 0.63 | 4.878 | 2.0260 |
| 350042 | 0.00 | 0.00 | −1.53 | 0.53 | 0.03 | 1.63 | 163 | 0.01 | −0.01 | 103.00 | 1.49 | 7.500 | 2.0260 |
| 347461 | −2.12 | 0.52 | 0.14 | 2.02 | 0.00 | 1.47 | 159 | 0.15 | −1.06 | −1.13 | −1.91 | 8.552 | 2.0250 |
| 351745 | 0.00 | 0.00 | −0.72 | 0.20 | 0.20 | 1.63 | 129 | 0.03 | −0.10 | 8.20 | 0.67 | 7.274 | 2.0220 |
| 350217 | 0.15 | 1.61 | −0.80 | 1.49 | 0.00 | 0.00 | 146 | 0.90 | 0.07 | −11.67 | −0.63 | 4.055 | 2.0210 |
| 347599 | −0.06 | 1.33 | 0.31 | 1.75 | −1.00 | 1.78 | 163 | 0.66 | 0.47 | 1.79 | 0.74 | 4.683 | 2.0210 |
| 345617 | −0.76 | 0.52 | 0.04 | 0.87 | 0.04 | 1.75 | 164 | 0.13 | −0.40 | −1.00 | −0.70 | 4.746 | 2.0200 |
| 344362 | 0.00 | 0.00 | −0.92 | 1.12 | 0.10 | 1.63 | 164 | 0.06 | −0.05 | 19.40 | 0.81 | 4.506 | 2.0190 |
| 352640 | 0.20 | 1.53 | −0.36 | 2.01 | −1.08 | 0.83 | 160 | 0.83 | 0.64 | 0.13 | 0.69 | 4.864 | 2.0170 |
| 346612 | 0.64 | 1.89 | −0.33 | 1.51 | −0.13 | 1.43 | 163 | 0.45 | 0.39 | −1.52 | 0.44 | 4.246 | 2.0170 |
| 343513 | −0.10 | 0.85 | −0.84 | 0.88 | 0.05 | 1.83 | 140 | 0.20 | −0.08 | 10.87 | 0.42 | 4.585 | 2.0160 |
| 347501 | 0.02 | 1.78 | −0.35 | 1.17 | 1.01 | 1.92 | 164 | 0.68 | −0.49 | 1.75 | −0.81 | 4.656 | 2.0160 |
| 350426 | −0.59 | 0.91 | 0.38 | 1.63 | 0.04 | 2.09 | 143 | 0.47 | −0.32 | −2.08 | −0.35 | 4.218 | 2.0150 |
| 345142 | 0.27 | 1.76 | 0.12 | 1.68 | −0.63 | 1.20 | 161 | 0.55 | 0.45 | 0.67 | 0.48 | 4.231 | 2.0130 |
| 353319 | −0.94 | 1.15 | 0.16 | 1.69 | 0.01 | 1.60 | 164 | 0.31 | −0.47 | −1.32 | −0.71 | 4.801 | 2.0130 |
| 345639 | −0.83 | 0.64 | −0.07 | 1.44 | 0.06 | 1.72 | 162 | 0.22 | −0.44 | −0.71 | −0.62 | 4.778 | 2.0120 |
| 352578 | 0.30 | 1.64 | −0.24 | 1.69 | −0.81 | 1.24 | 156 | 0.72 | 0.56 | 0.03 | 0.56 | 4.617 | 2.0100 |
| 343981 | 0.13 | 1.63 | 0.07 | 1.62 | −1.00 | 0.77 | 158 | 0.77 | 0.56 | 0.89 | 0.83 | 5.282 | 2.0080 |
| 344472 | −0.25 | 1.34 | −0.30 | 1.27 | 0.65 | 2.02 | 156 | 0.49 | −0.45 | 1.11 | −0.44 | 4.187 | 2.0070 |
| 353187 | 0.00 | 0.00 | −1.04 | 1.39 | 0.11 | 1.60 | 164 | 0.05 | −0.06 | 19.91 | 0.92 | 4.397 | 2.0040 |
| 351780 | 0.01 | 1.60 | 0.16 | 1.69 | −0.94 | 1.15 | 164 | 0.69 | 0.47 | 1.32 | 0.71 | 4.801 | 2.0010 |
| 345444 | 0.03 | 1.65 | −0.94 | 0.56 | 0.00 | 0.00 | 162 | 0.98 | 0.01 | −63.67 | −0.90 | 5.480 | 2.0010 |

Locus is the ParAllele identifiers of the polymorphisms,
N is the number of genotypes,
mean_0 is the mean intramuscular fat for genotype 0,
mean_1 is the mean for genotype 1, and
mean_2 is the mean of genotype 2,
SD is the standard deviation,
a is the additive effect,
k is the dominance effect,
alpha is the average effect of allele substitutions,
tmax is the value of the t test, and
log(1/P) is the P value determined from 100,000 permutation tests expressed as a positive integer.
A minus value for a means the mean of genotype 0 is lower than the mean of genotype 2, and a minus value for alpha means that selecting for allele 0 will reduce the average values of intramuscular fat in the population.

TABLE 10
SNPs with a high probability of being associated with IMF. The idents
are those in Table 9 and are the ParAllele identifiers. These are located on the
BGSP scaffolds and contigs which indicate the SNP location. These scaffolds and
contigs have been graphically located to maps on the biolives website.

| Ident | scaffold | contig chr. | Gene comment | | SEQ ID NO |
|---|---|---|---|---|---|
| 343054 | SCAFFOLD317931_3159 | contig346200 | Bta13 or BTA-none | near TPT1 | 214 |
| 343362 | SCAFFOLD176082_5591 | contig172672 | Bta2 | GTF3C2 | 215 |
| 345497 | SCAFFOLD15887_443 | contig138107 | Bta2 | between LOC440930-ZNFN1A2 | 216 |
| 347422 | SCAFFOLD216467_6791 | contig11773 | Hsa12 | near SLC6A15 | 217 |
| 348950 | SCAFFOLD115159_16552 | contig68050 | Hsa10 | intron of CTNNA3 | 218 |
| 349339 | SCAFFOLD245307_20842 | contig21810 | Hsa5 | between EPB41LA and APC | 219 |
| 352076 | SCAFFOLD155567_7634 | contig352746 | Hsa5 | intron of DDX46 | 220 |
| 352376 | SCAFFOLD323635_4902 | contig252674 | Hsa1 | HS2ST1 not near RORC | 221 |
| 353331 | SCAFFOLD331833_481 | contig298758 | Bta-none | not recognised | 222 |
| 353833 | SCAFFOLD230335_25665 | contig19309 | Bta 5 or Bta-none | between LOC401178-CDH6 | 223 |

[0094] The sequence listing attached hereto gives DNA sequence for the contigs described in Table 10, and includes identification of the scaffold including the base pairs spanned by the contig and also identification of the position and nature of the polymorphism. For example, SEQ ID NO: 214 is for contig 346200, which spans scaffold 317931 from position 2394 to position 4575. In this instance the SNP is at position 3159, and the polymorphic form which favours intramuscular fat deposition is the form where base 3159 is A.

TABLE 11
Parallele identifiers for additional SNP associated with IMF (nir fat) showing
the sequence scaffold, the Baylor College of Medicine sequence contig containing the SNP,
the Genbank Accession of the DNA sequence, and the alternative bases for each SNP. The
exact location of each SNP is shown in the sequence scaffold, the number after the
underscore is the exact base pair from the start of the scaffold.

| | | Sequence | | Genbank | | SEQ ID |
|---|---|---|---|---|---|---|
| Ident | Ibiss4 | scaffold | Baylor Contig | Accession | SNP bases | NO: |
| 349269 | Null | SCAFFOLD224445_646 | Contig688345 | AAFC01688313 | A/G | 224 |
| 349388 | Null | SCAFFOLD261939_1026 | Contig290263 | AAFC01290254 | G/T | 225 |
| 351385 | Null | SCAFFOLD116234_3345 | Contig387450 | AAFC01387438 | C/T | 226 |
| 353697 | Null | SCAFFOLD75727_10176 | Contig497215 | AAFC01497199 | A/G | 227 |
| 342572 | Null | SCAFFOLD266585_13721 | Contig144982 | AAFC01144976 | C/G | 228 |
| 342814 | Null | SCAFFOLD10496_11993 | Contig353686 | AAFC01353676 | A/G | 229 |
| 342909 | Null | SCAFFOLD181448_3708 | Contig403002 | AAFC01402989 | G/T | 230 |
| 343414 | Null | SCAFFOLD205015_1947 | Contig519798 | AAFC01519777 | C/T | 231 |
| 343536 | Null | SCAFFOLD283786_511 | Contig642091 | AAFC01642063 | A/G | 232 |
| 343542 | Null | SCAFFOLD290008_39459 | Contig19542 | AAFC01019542 | C/T | 233 |
| 343610 | Null | SCAFFOLD322423_1597 | Contig155852 | AAFC01155846 | A/G | 234 |
| 343827 | Null | SCAFFOLD100229_4858 | Contig30336 | AAFC01030336 | C/T | 235 |
| 343943 | Null | SCAFFOLD155268_21318 | Contig69791 | AAFC01069790 | C/T | 236 |
| 344028 | Null | SCAFFOLD194940_1187 | Contig473431 | AAFC01473415 | C/T | 237 |
| 344286 | Null | SCAFFOLD315271_6985 | Contig129954 | AAFC01129949 | G/T | 238 |
| 344319 | Null | SCAFFOLD359101_685 | Contig643326 | AAFC01643298 | C/T | 239 |
| 344554 | Null | SCAFFOLD105489_6953 | Contig82349 | AAFC01082348 | C/T | 240 |
| 344636 | Null | SCAFFOLD140875_7990 | Contig143679 | AAFC01143674 | A/G | 241 |
| 344851 | Null | SCAFFOLD230819_6338 | Contig399586 | AAFC01399573 | A/G | 242 |
| 344969 | Null | SCAFFOLD270010_49832 | Contig260643 | AAFC01260634 | C/T | 243 |
| 345154 | Null | SCAFFOLD57440_852 | Contig623028 | AAFC01623000 | C/T | 244 |
| 345203 | Null | SCAFFOLD76111_6497 | Contig167797 | AAFC01167791 | G/T | 245 |
| 345544 | Null | SCAFFOLD171748_1363 | Contig32037 | AAFC01032036 | A/G | 246 |
| 345719 | Null | SCAFFOLD235985_4468 | Contig15384 | AAFC01015384 | C/T | 247 |
| 345797 | Null | SCAFFOLD260513_2368 | Contig235872 | AAFC01235865 | A/G | 248 |
| 346008 | Null | SCAFFOLD41387_6913 | Contig28445 | AAFC01028445 | A/G | 249 |
| 346040 | Null | SCAFFOLD5257_13662 | Contig239211 | AAFC01239204 | A/G | 250 |
| 346154 | Null | SCAFFOLD95032_25614 | Contig339474 | AAFC01339464 | A/G | 251 |
| 346417 | Null | SCAFFOLD170179_19975 | Contig32904 | AAFC01032903 | A/G | 252 |
| 346418 | Null | SCAFFOLD170189_10300 | Contig399829 | AAFC01399816 | C/T | 253 |
| 346520 | Null | SCAFFOLD205603_7508 | Contig73971 | AAFC01073970 | A/G | 254 |
| 346584 | Null | SCAFFOLD231067_8487 | Contig661341 | AAFC01661313 | C/T | 255 |
| 346701 | Null | SCAFFOLD275001_30112 | Contig164110 | AAFC01164104 | C/T | 256 |
| 346888 | Null | SCAFFOLD41654_3571 | Contig180954 | AAFC01180948 | A/G | 257 |
| 346905 | Null | SCAFFOLD50003_7361 | Contig263385 | AAFC01263376 | A/G | 258 |
| 347009 | Null | SCAFFOLD85346_9768 | Contig147150 | AAFC01147144 | A/G | 259 |
| 347100 | Null | SCAFFOLD102006_3674 | Contig179930 | AAFC01179924 | C/T | 260 |
| 347206 | Null | SCAFFOLD144700_3239 | Contig20365 | AAFC01020365 | C/T | 261 |
| 347642 | Null | SCAFFOLD286711_9315 | Contig36453 | AAFC01036452 | A/C | 262 |
| 347674 | Null | SCAFFOLD296243_14017 | Contig56939 | AAFC01056938 | C/T | 263 |
| 347705 | Null | SCAFFOLD306025_6030 | Contig121863 | AAFC01121858 | A/T | 264 |
| 347715 | Null | SCAFFOLD310358_2998 | Contig327981 | AAFC01327971 | G/T | 265 |
| 348202 | Null | SCAFFOLD153044_4148 | Contig163124 | AAFC01163118 | G/T | 266 |
| 348212 | Null | SCAFFOLD155358_14044 | Contig238647 | AAFC01238640 | C/T | 267 |
| 348323 | Null | SCAFFOLD200129_19087 | Contig91367 | AAFC01091365 | C/T | 268 |
| 348335 | Null | SCAFFOLD201086_2241 | Contig111786 | AAFC01111783 | A/T | 269 |
| 348372 | Null | SCAFFOLD215074_4772 | Contig362870 | AAFC01362860 | C/G | 270 |
| 348491 | Null | SCAFFOLD256751_6825 | Contig293941 | AAFC01293931 | A/G | 271 |
| 348656 | Null | SCAFFOLD316702_22782 | Contig360244 | AAFC01360234 | C/T | 272 |
| 348725 | Null | SCAFFOLD46484_3236 | Contig237587 | AAFC01237580 | C/T | 273 |
| 348758 | Null | SCAFFOLD57440_686 | Contig623028 | AAFC01623000 | C/G | 274 |
| 349071 | Null | SCAFFOLD155739_13472 | Contig48739 | AAFC01048738 | A/C | 275 |
| 349469 | Null | SCAFFOLD290227_13905 | Contig149729 | AAFC01149723 | C/T | 276 |
| 349644 | Null | SCAFFOLD57440_997 | Contig623028 | AAFC01623000 | C/T | 277 |
| 349668 | Null | SCAFFOLD66599_4817 | Contig332084 | AAFC01332074 | C/T | 278 |
| 350008 | Null | SCAFFOLD185315_13446 | Contig212367 | AAFC01212361 | A/G | 279 |
| 350037 | Null | SCAFFOLD195108_11452 | Contig467929 | AAFC01467914 | A/G | 280 |
| 350281 | Null | SCAFFOLD286032_4505 | Contig116512 | AAFC01116508 | A/C | 281 |
| 350377 | Null | SCAFFOLD321801_17599 | Contig357493 | AAFC01357483 | A/G | 282 |
| 350400 | Null | SCAFFOLD35711_6623 | Contig354565 | AAFC01354555 | A/G | 283 |
| 350424 | Null | SCAFFOLD46484_3646 | Contig237587 | AAFC01237580 | A/C | 284 |
| 350456 | Null | SCAFFOLD57440_830 | Contig623028 | AAFC01623000 | A/G | 285 |
| 350574 | Null | SCAFFOLD95294_1331 | Contig237582 | AAFC01237575 | A/G | 286 |
| 350575 | Null | SCAFFOLD95406_25218 | Contig146950 | AAFC01146944 | A/G | 287 |
| 350825 | Null | SCAFFOLD190005_17363 | Contig618387 | AAFC01618359 | A/G | 288 |
| 350910 | Null | SCAFFOLD231448_1251 | Contig295656 | AAFC01295646 | C/G | 289 |
| 350939 | Null | SCAFFOLD246302_658 | Contig168140 | AAFC01168134 | C/T | 290 |
| 350947 | Null | SCAFFOLD2481_1679 | Contig499892 | AAFC01499876 | A/G | 291 |
| 351213 | Null | SCAFFOLD57440_1077 | Contig623028 | AAFC01623000 | A/G | 292 |
| 351244 | Null | SCAFFOLD70184_5754 | Contig436401 | AAFC01436387 | C/T | 293 |
| 351492 | Null | SCAFFOLD180438_11374 | Contig6788 | AAFC01006788 | A/C | 294 |
| 351586 | Null | SCAFFOLD228449_857 | Contig590514 | AAFC01590490 | A/T | 295 |
| 351608 | Null | SCAFFOLD241780_414 | Contig224973 | AAFC01224967 | A/G | 296 |
| 351679 | Null | SCAFFOLD271779_2717 | Contig64086 | AAFC01064085 | A/C | 297 |
| 351771 | Null | SCAFFOLD313482_2366 | Contig571989 | AAFC01571967 | C/T | 298 |
| 351811 | Null | SCAFFOLD35711_6338 | Contig354565 | AAFC01354555 | A/G | 299 |
| 352000 | Null | SCAFFOLD120053_24927 | Contig192565 | AAFC01192559 | A/G | 300 |
| 352119 | Null | SCAFFOLD175748_9339 | Contig30083 | AAFC01030083 | C/T | 301 |
| 352213 | Null | SCAFFOLD231881_801 | Contig110009 | AAFC01110006 | C/G | 302 |
| 352223 | Null | SCAFFOLD240106_868 | Contig188411 | AAFC01188405 | C/T | 303 |
| 352287 | Null | SCAFFOLD275009_42406 | Contig97781 | AAFC01097779 | C/T | 304 |
| 352332 | Null | SCAFFOLD297961_1269 | Contig426075 | AAFC01426062 | A/C | 305 |
| 352361 | Null | SCAFFOLD314595_482 | Contig474267 | AAFC01474251 | G/T | 306 |
| 352384 | Null | SCAFFOLD359101_308 | Contig643326 | AAFC01643298 | A/G | 307 |
| 352386 | Null | SCAFFOLD36540_3105 | Contig530720 | AAFC01530699 | C/T | 308 |
| 352521 | Null | SCAFFOLD10136_11963 | Contig370580 | AAFC01370570 | C/T | 309 |
| 352656 | Null | SCAFFOLD175694_9476 | Contig147435 | AAFC01147429 | A/G | 310 |
| 352674 | Null | SCAFFOLD185498_17443 | Contig233272 | AAFC01233266 | C/T | 311 |
| 352680 | Null | SCAFFOLD190005_17208 | Contig618387 | AAFC01618359 | A/T | 312 |
| 352880 | Null | SCAFFOLD312013_2996 | Contig695493 | AAFC01695460 | A/G | 313 |
| 352931 | Null | SCAFFOLD5437_10749 | Contig620684 | AAFC01620656 | C/T | 314 |
| 353046 | Null | SCAFFOLD111784_3403 | Contig267069 | AAFC01267060 | A/T | 315 |
| 353087 | Null | SCAFFOLD145449_8789 | Contig125043 | AAFC01125038 | A/T | 316 |
| 353107 | Null | SCAFFOLD155567_7798 | Contig352746 | AAFC01352736 | A/T | 317 |
| 353169 | Null | SCAFFOLD200171_10802 | Contig119374 | AAFC01119370 | C/T | 318 |
| 353195 | Null | SCAFFOLD228449_804 | Contig590514 | AAFC01590490 | C/T | 319 |
| 353436 | Null | SCAFFOLD105396_111 | Contig592585 | AAFC01592560 | C/T | 320 |
| 353461 | Null | SCAFFOLD129380_654 | Contig570695 | AAFC01570673 | G/T | 321 |
| 353547 | Null | SCAFFOLD210324_16928 | Contig271155 | AAFC01271146 | A/C | 322 |
| 353584 | Null | SCAFFOLD25129_31576 | Contig459226 | AAFC01459211 | A/G | 323 |
| 353680 | Null | SCAFFOLD60869_3029 | Contig78108 | AAFC01078107 | A/G | 324 |
| 353897 | Null | SCAFFOLD3764_2424 | Contig378994 | AAFC01378984 | C/G | 325 |
| 353963 | Null | SCAFFOLD101186_2768 | Contig511484 | AAFC01511465 | A/C | 326 |
| 354030 | Null | SCAFFOLD252807_1837 | Contig353800 | AAFC01353790 | C/T | 327 |
| 354084 | Null | SCAFFOLD56872_6443 | Contig539685 | AAFC01539664 | A/G | 328 |
| 354170 | Null | SCAFFOLD256846_676 | Contig450844 | AAFC01450830 | A/T | 329 |
| 354324 | Null | SCAFFOLD41844_3489 | Contig585945 | AAFC01585921 | C/T | 330 |
| 354350 | Null | SCAFFOLD156114_6977 | Contig190583 | AAFC01190577 | G/T | 331 |
| 354364 | Null | SCAFFOLD20725_8663 | Contig703990 | AAFC01703955 | A/T | 332 |
| 354499 | Null | SCAFFOLD286022_2896 | Contig353540 | AAFC01353530 | A/C | 333 |
| 345544 | Null | SCAFFOLD171748_1363 | Contig32037 | AAFC01032036 | A/G | 334 |

TABLE 12
SNP associated with IMF (nir fat) obtained from the IBISS4 database.

| | | | |
|---|---|---|---|
| IBISS4snp344 | IBISS4 | btcn22113 11/17 | 717 |

(SEQ ID NO: 335)

| | |
|---|---|
| TAACTTGCATATTGTGGAACAGCAACATTGTGATTCTCTTGCTCTATTGA | A/G |
| ATGCTTTCCTGTTAATTCTCAATTGAATTGAGCATTCCATGTTTTCTGCT | Homo sapiens OCIA domain containing 2 |
| | (OCIAD2), mRNA 1e−87 |

| | | | |
|---|---|---|---|
| IBISS4snp497 | IBISS4 | btcn26916 8/13 | 724 |

(SEQ ID NO: 336)

| | |
|---|---|
| GAATCGACGGACTACATTTGCCCAATGGAGCCCAGCAACAGTGTTGGTGA | C/T |
| GGTCACAGGGCCTACAGTGGCACCCGGGGCCTCAGCACACTTGATGCCCC | PREDICTED: Homo sapiens PTPRF interacting protein, |
| | binding protein 2 (liprin beta 2) (PPFIBP2), mRNA |
| | 0.0 |

| | | | |
|---|---|---|---|
| IBISS4snp498 | IBISS4 | btcn26916 6/10 | 1258 |

(SEQ ID NO: 337)

| | |
|---|---|
| CCAGAGTTTTGGCTGCAGGGACAGAGCAGGGCCTTCTGCTGTGGGGACAA | C/T |
| GGAACTGTCGTGACTTCATTCAGAGGTGGTCTCTTCTTTCGGTAATAAAA | PREDICTED: Homo sapiens PTPRF interacting protein, |
| | binding protein 2 (liprin beta 2) (PPFIBP2), mRNA |
| | 0.0 |

| | | | |
|---|---|---|---|
| IBISS4snp588 | IBISS4 | btcn28905 11/19 | 851 |

(SEQ ID NO: 338)

| | |
|---|---|
| GGAAGCATTCCTGGCAAAAATGCAGCTGAGTATGAGGTGATCATTGTGAT | T/C GAGCCTGGGCTGCTTTTTGAGA |
| | Homo sapiens mitochondrial isoleucine tRNA |
| | synthetase (FLJ10326), mRNA 0.0 |

| | | | |
|---|---|---|---|
| IBISS4snp589 | IBISS4 | btcn28905 12/23 | 1241 |

(SEQ ID NO: 339)

| | |
|---|---|
| GGCTTTCTGAGCAAGAACCTCCTGACAGGACTGAGTAGGGGTCTAGATGG | G/T |
| TTGTTTACAGTACTGGAGAGAAATCCAAGATTGAGGATGAGTCCAAGTCA | Homo sapiens mitochondrial isoleucine tRNA |
| | synthetase (FLJ10326), mRNA 0.0 |

| | | | |
|---|---|---|---|
| IBISS4snp908 | IBISS4 | btcn50316 10/17 | 1379 |

(SEQ ID NO: 340)

| | |
|---|---|
| GGTTCCAGGGGGGCAGCCCTACCTCACCTTCACCTGTCCCATCCCCCTTC | G/A |
| GTGTGGTGGTGGCCAAAGTGCTCCCAGGGTGCTATACATCAGAGCTGGGC | Homo sapiens FK506 binding protein 10, 65 kDa |
| | (FKBP10), mRNA 0.0 |

| | | | |
|---|---|---|---|
| IBISS4snp1100 | IBISS4 | btcn8874 10/18 | 958 |

(SEQ ID NO: 341)

| | |
|---|---|
| GGACTTCCCCAACCCCTATCGTTTCCCCTGCATCTCGGGGCCCAGGATGC | G/A |
| GTCTGACCTGACCCACACCAAATAGCATTGAGCTGTAAACCTTTTTTTAT | Homo sapiens pituitary tumor-transforming 1 |
| | interacting protein (PTTG1IP), mRNA 3e−21 |

### EXAMPLE 5

[0095] To find loci affecting intramuscular fat, further analyses of the whole genome SNP scan were performed. First, the NIRFAT trait values for all measured individuals, not just the 189 in the whole genome scan, were adjusted using the model nirfat ˜ mu herd kill_group age ! sireid using ASREML, in which herd and kill_group are fixed effects, age is a covariate, and sireid is the random effect of sire. The residual NIRFAT phenotypes were then available for further analysis. The means and standard errors of the residual NIRFAT for each genotype in the whole genome scan were calculated and at test computed for each comparison. The statistical significance of the largest mean difference was calculated using 100,000 permutations.

[0096] The results of this analysis indicates loci of interest at (P<0.001) (Table 13).

TABLE 13
A set of loci with high levels of support associated with high intramuscular fat.
Snp_id is the ParAllele SNP identifier, scaffold-v2 is the version 2 scaffold, bp is the
location of the SNP in the scaffold, scaffold-v1/IBISS4 gives a direct reference to the SNP,
Hsa is the human chromosome associated with the SNP and Gene is the closest gene to the SNP.

| | scaffold- | | | | | |
|---|---|---|---|---|---|---|
| snp_id | v2 | location | IBISS4/scaffold-v1 | Hsa | Gene | SEQ ID NO: |
| 343800 | 29.18 | 507265 | IBISS4snp713 | 11 | HSPC138 hypothetic | 342 |
| | | | | | protein | |
| 344648 | 4.136 | 45307 | SCAFFOLD146712_2778 | 7 | LOC154790 hypothetic | 343 |
| | | | | | protein | |
| 345273 | 15.136 | 87593 | IBISS4snp894 | 11 | NDUFS3 NADH- | 344 |
| | | | | | ubiquinone | |
| | | | | | oxidoreductase Fe—S | |
| | | | | | protein 3 | |
| 346887 | Un.518 | 242898 | SCAFFOLD4115_5839 | 9 | no gene near | 345 |
| 347425 | 25.88 | 445813 | SCAFFOLD216862_6835 | 7 | PMS2 postmeiotic | 346 |
| | | | | | segregation | |
| | | | | | increased, S. cerevisiae | |
| 349876 | Un.281 | 248625 | SCAFFOLD135077_3922 | X | no gene near | 347 |
| 351544 | Un.16047 | 5152 | SCAFFOLD205589_8358 | | no gene near | 348 |
| 352303 | Un.516 | 289156 | SCAFFOLD285028_33704 | X | near TMEM47 | 349 |
| | | | | | transmembrane protein | |
| | | | | | 47 | |
| 354161 | Un.3082 | 36240 | SCAFFOLD220007_32349 | 4 | no gene near | 350 |
| 354162 | Un.3082 | 36175 | SCAFFOLD220007_32284 | 4 | no gene near | 351 |

TABLE 14
Associations between DNA markers and intramuscular fat sorted in decreasing order of
statistical significance. Locus is the ParAllele identifiers of the polymorphisms, N is the
number of genotypes, mean_0 is the mean net feed intake for genotype 0, mean_1 is the mean for
genotype 1, and mean_2 is the mean of genotype 2, SE is the standard error, a is the additive
effect, k is the dominance effect, alpha is the average effect of allele substitutions, tmax
is the value of the t test, and PermP is the P value determined from 100,000 permutation tests
expressed as a positive integer. A minus value for a means the mean of genotype 0 is lower
than the mean of genotype 2, and a minus value for alpha means that selecting for allele 0
will reduce the average values of intramuscular fat in the population. Scaffold-v2 is the
Draft version 2 Bovine genome sequence, bp is the location in base pairs in the scaffold, and
bases are the alternative bases.

| snp_id | scaffold-v2 | bp | bases | | mean0 | SE | mean1 | SE | mean2 | SE |
|---|---|---|---|---|---|---|---|---|---|---|
| 344648 | 4.136 | 45307 | G/T | 344648 | 1.90 | 0.61 | −0.28 | 0.21 | −0.16 | 0.11 |
| 346887 | Un.518 | 242898 | C/T | 346887 | −0.26 | 0.11 | 0.84 | 0.29 | 0.27 | 1.14 |
| 343800 | 29.18 | 507265 | A/G | 343800 | −0.21 | 0.21 | 0.23 | 0.16 | −0.46 | 0.17 |
| 345273 | 15.136 | 87593 | C/T | 345273 | −0.50 | 0.13 | 0.24 | 0.16 | 0.13 | 0.31 |
| 351544 | Un.16047 | 5152 | C/T | 351544 | −0.06 | 0.11 | −0.53 | 0.24 | 1.38 | 0.43 |
| 349876 | Un.281 | 248625 | C/T | 349876 | −0.12 | 0.11 | −0.22 | 0.22 | 1.64 | 0.84 |
| 352303 | Un.516 | 289156 | C/T | 352303 | 0.26 | 0.14 | NaN | NaN | −0.40 | 0.14 |
| 347425 | 25.88 | 445813 | A/G | 347425 | −0.48 | 0.18 | 0.41 | 0.19 | −0.23 | 0.14 |
| 354161 | Un.3082 | 36240 | C/T | 354161 | −0.01 | 0.14 | −0.43 | 0.15 | 0.63 | 0.36 |
| 354162 | Un.3082 | 36175 | G/T | 354162 | 1.73 | 0.79 | −0.44 | 0.16 | −0.01 | 0.13 |

| snp_id | N | Freq | a | −k | alpha | tmax | PermP | SEQ ID NO: |
|---|---|---|---|---|---|---|---|---|
| 344648 | 162 | 0.18 | 1.03 | −1.12 | 1.76 | 4.67 | 0.0000 | 343 |
| 346887 | 162 | 0.90 | −0.26 | −3.18 | 0.41 | 4.04 | 0.0000 | 345 |
| 343800 | 155 | 0.45 | 0.12 | 4.55 | 0.06 | 2.97 | 0.0001 | 342 |
| 345273 | 149 | 0.62 | −0.31 | −1.36 | −0.21 | 3.59 | 0.0001 | 344 |
| 351544 | 163 | 0.84 | −0.72 | 1.64 | −1.52 | 3.64 | 0.0002 | 348 |
| 349876 | 163 | 0.82 | −0.88 | 1.12 | −1.50 | 3.59 | 0.0003 | 347 |
| 352303 | 163 | 0.48 | 0.33 | NaN | NaN | 3.31 | 0.0006 | 349 |
| 347425 | 162 | 0.50 | −0.13 | −6.12 | −0.12 | 3.41 | 0.0007 | 346 |
| 354161 | 163 | 0.73 | −0.32 | 2.28 | −0.66 | 3.22 | 0.0008 | 350 |
| 354162 | 162 | 0.19 | 0.87 | −1.50 | 1.68 | 4.19 | 0.0008 | 351 |

TABLE 15

DNA sequences for each of the SNP ID in
Table 13.

| | | | |
|---|---|---|---|
| | | | 3′ |
| | scaffold- | 5′flanking sequence | flanking |
| Snp_id | v1/IBISS4 | alternative bases | sequence |

(SEQ ID NO: 342)

| | | | |
|---|---|---|---|
| 343800 | IBISS4snp713 | GCGTTCCTGCCCCTGTCCT | A/G |
| | | CGTCACTATGTAGCTGAGG | |
| | | GGCAGGAGGCCTTTCCACG | |
| | | TTCTGGAAGGTTCTTGGGC | |
| | | TCGACCACGGCAGTAGCCC | |
| | | CAGGA | |

(SEQ ID NO: 343)

| | | | |
|---|---|---|---|
| 344648 | SCAFFOLD146712_ | TCAGAAGGGAAAGAAAAAT | T/G |
| | 2778 | GCATGTGTTTAGTCTGCCG | |
| | | TCTTTATTTGCAAGTCCAA | |
| | | CAGACATTCGGGAGTCCTT | |
| | | GCTATGGGCATGGTTTGTA | |
| | | CTGACAACTAAGCAGGATC | |
| | | CAGAGGCGGGCGGCCCCAG | |
| | | GCCCGTTAAGAGCAGAGGG | |
| | | CTGAACCCCATCTGGGTCA | |
| | | GCTCTGCCGTCCCCAGGGG | |
| | | CTGCGTGTTGTAAGGTTGA | |
| | | TGCCCTTGAGCTGCATGGT | |
| | | GGCGCCCATGGCAAGTACG | |
| | | CTG | |
| | | GTGAATCCTTCTTTTTCCG | |
| | | TCCATAAACACCTCTCAGT | |
| | | CCGCATTGTAAACCACTTC | |
| | | ACCTGGGTTCACATTCCAG | |
| | | CTCTGCCACTTTCTTGTGG | |
| | | CAAAGTTACTTAGCTTCTA | |
| | | TTTCATTTTCCTTGTCTTT | |
| | | AAGACAAAGTCATTATAGT | |
| | | ATCTGCCTCTTAGAATTTT | |
| | | ATGAGAATTCAACAAATTG | |
| | | TGCTTAGAGCAGTGCCTGG | |
| | | CACAGTAAGCTCTCCTTCA | |
| | | GTGTCAGCAACTACCATCA | |
| | | TGA | |

(SEQ ID NO: 344)

| | | | |
|---|---|---|---|
| 345273 | IBISS4snp894 | CATCCTGATGGGGTCATCC | T/C |
| | | CAGTGCTGACTTTCCTCAG | |
| | | GGATCACAGCAAGCACAAT | |
| | | TCAAATCCTTGGCTGACTT | |
| | | GA | |

(SEQ ID NO: 345)

| | | | |
|---|---|---|---|
| 346887 | SCAFFOLD4115_ | GCTTTCTGCCTCAGTGGGA | C/T |
| | 5839 | GACACACCAAAATCAGTGC | |
| | | CCCTTGGACTGTGATCTGT | |
| | | GCTGTGCTGTGCTTAGTTG | |
| | | CTCTGTCGTGTCCAACCCT | |
| | | TTGTGACCCTATGGACTGT | |
| | | AACCTGCCAGGCTTCTCTG | |
| | | TCCATGGGGATTCTCCAGG | |
| | | CAAGAGTACTGGAGTGGGC | |
| | | AGCCATGCCCTCCTCCAGG | |
| | | GGATCTTCCCCCTGGATCT | |
| | | TCCCAACCCAGGTCTCAGG | |
| | | AATATCACTTACCCTCACT | |
| | | GGG | |
| | | CTCACTATCCTTATCTCTG | |
| | | ACATGATGGGACTGGAACT | |
| | | ATTGACCTCTAAGATCTCT | |
| | | CTTCAGCTCTAACATGCTC | |
| | | TGGTTATAAGCACCTTTGG | |
| | | ATGACGGCAATATTTATAG | |
| | | GCAATGATATGACTAGAGA | |
| | | ATATTTAGACTGATTCATA | |
| | | GTCTGTGTGAGGCAGAGAA | |
| | | GAACATGCAAAGTCTTTTG | |
| | | GGAAAGAAGTTATTTTTGA | |
| | | GTGCTGTAAAACCCTAGTA | |
| | | ATAAAACACAAATTCAAAA | |
| | | ATG | |

(SEQ ID NO: 346)

| | | | |
|---|---|---|---|
| 347425 | SCAFFOLD216862_ | TCTGCTCAGGGGCCCCACG | G/A |
| | 6835 | ACTTGATGAGCAGAGTGGA | |
| | | GATGGAGGAGGACTCGGGG | |
| | | CACGGCAGCGCATCTGCCG | |
| | | GCTCCGAGGAGGCATCCAG | |
| | | CACCCCCGAGACAAGCAGT | |
| | | CACCCCAGCACTGACCGGG | |
| | | TGGCAAGCTCCCCCGAAGA | |
| | | CAAATTTTCCCAAGAAAAT | |
| | | ATGGAGTCTCGGGAAAAGT | |
| | | TACCTGAAACTGACCATCG | |
| | | TCTCTCAGGCACAAAGTGC | |
| | | CATTTAAACCAAGAAGAAA | |
| | | GCA | |
| | | CTCCACATCTGGAGTCTTG | |
| | | CCGCAGCCCACAAAGCTCT | |
| | | CATCCCCAAATGCAAAGCG | |
| | | TTTTACAAAAGAAGGGATT | |
| | | CCTTTAAATCCCAGTGTCC | |
| | | TTGCAGAGTCGGTGAAAGC | |
| | | CCAGAGTGCGTCAGCTACA | |
| | | GTGGATGTAGCTGTGAAAA | |
| | | TTAACAAGAAAATAGTGCC | |
| | | CCTTGATTTTTCCATGAGT | |
| | | TCTTTAGCCAAACGAATAA | |
| | | AGCAGTTGTGTCAGCAAGA | |
| | | ACAGCAACAAGAAAGTCAA | |
| | | CAG | |

(SEQ ID NO: 347)

| | | | |
|---|---|---|---|
| 349876 | SCAFFOLD135077_ | AGACTCAGATATCCTGCAT | T/C |
| | 3922 | TGGCATGTGGATTCCTAAC | |
| | | CACTGGACCACCAACCAGG | |
| | | AAACCCTCACGTTATGTTC | |
| | | CTATTAACACCTCCATCGA | |
| | | CTTCTCATCCCTCTTGTCT | |
| | | GTTCCTTTAGTCAAGCTGG | |
| | | CTGCCCACATCGCATTGTT | |
| | | TTAATTACTATAAACCTTC | |
| | | TAATGTGATGTATCCTGTT | |
| | | GTAATGCTGTTTAGTAGGA | |
| | | GAATTGCCCCCAACTTTTT | |
| | | ATTATCCTTCCAAATAGTG | |
| | | TTGG | |
| | | AGTTCTTATACACTCACTG | |
| | | TCCATGTGAAAAAAATCAC | |
| | | CATCGTTTGCAGTGTAAAG | |
| | | AAATACGCTATCGTGGTTA | |
| | | TGCTAGCTGATTTGCATTG | |
| | | AACTGATGGCTTACTCCAA | |
| | | GGATAATAAACATCTTTAA | |
| | | AGATCATTGCGTCTTCCCT | |
| | | TTAGTGGGAAGTGAAAGTT | |
| | | GTCCAACTCTTTGCGACAC | |
| | | CATGGACTGTCCATGGAAT | |
| | | TCTTCAGGCCAGAATACTG | |
| | | GAGTGGGTATCCTTGCCCT | |
| | | TCC | |

(SEQ ID NO: 348)

| | | | |
|---|---|---|---|
| 351544 | SCAFFOLD205589_ | AGCCCACCAGGCTCCCCTG | T/C |
| | 8358 | TCCCTGGGATTCTCCAGGC | |
| | | AAGAACACTGGAGCGGGTT | |
| | | GCCATTTCCTTCTCCCATG | |
| | | TATGAAAGTGAAAACTCAA | |
| | | AGTGAAGTCGCTGAGTCAT | |
| | | GTCCGCCTGTTAGTGACCC | |
| | | ATGGACTGCAACCTACCAG | |
| | | GCTCCTCCATCCATGGGAT | |
| | | TTTCCAGGCAAGAGTACTG | |
| | | GAGTGGATTGTCATTTCCT | |
| | | TCTCCATTTTTTAGTTCTA | |
| | | TGGAAACACAAAAGACTTT | |
| | | GAA | |
| | | ACAAAACACAAAAGTCTTT | |
| | | GAAAAGACACAGTAATCTT | |
| | | GAGAAATAACAGAGCTGGA | |
| | | GTAGTCATACTCCCAGATT | |
| | | TTATACTATATTACAAAGC | |
| | | TACAGTAATCTAGACAGTA | |
| | | TGGTAGTGGCACAAAAGCA | |
| | | GAAATATAGATCAATGGAA | |
| | | CAGCATAGAAAGTCCAGAG | |
| | | ACACATCCATGCACCTACG | |
| | | GTCAATTAATCCTACAACA | |
| | | AAGGAGGCTAGAATATAAA | |
| | | AGAATAGAATGGAAAAGAC | |
| | | AGTC | |

(SEQ ID NO: 349)

| | | | |
|---|---|---|---|
| 352303 | SCAFFOLD285028_ | ATTGGTCAGTTTCATGCAG | T/C |
| | 33704 | GTCTGAATATACACATTTT | |
| | | GATTGAATTTGCTCAAAAG | |
| | | AAGATAGCTGCACTGTTAA | |
| | | TCATATTTATTAGTTGATC | |
| | | TTAAGAATTCATGCATTTA | |
| | | ATTGTTCTAGAATTAGAGA | |
| | | TAAACCTTGGAATTATGAC | |
| | | TGTGAGAAATGGCCAAGAG | |
| | | TTTCATTGGGGATGACAGA | |
| | | AGGCAATGCTGAGCAAGAA | |
| | | GGAGGTTTGAAATCCTGCA | |
| | | TTAATTCTAGAGTTCATCA | |
| | | ACC | |
| | | ATGACTATGGAAATCTCGA | |
| | | TATATTTGAATTGCAAAAA | |
| | | TTTATAAAAAACTCTTAAA | |
| | | TACTTTTTGTCCTTCTGTT | |
| | | TTCTCCTTCAATATAAGCC | |
| | | TACAAAATTATAAGGTACT | |
| | | TAAGTGTTGGGACCATGTC | |
| | | TCTGAATCTTTAATAACAA | |
| | | ACACACTCTCATAGTAGGT | |
| | | GTCCAAAACTATATTATTG | |
| | | ATTGTTTTATATGTGAGTT | |
| | | GGAGAAAAGATGCATAAAA | |
| | | ATGTCTAAGCATGCTAGAA | |
| | | TTCT | |

(SEQ ID NO: 350)

| | | | |
|---|---|---|---|
| 354161 | SCAFFOLD220007_ | TAATTAGGATACTGTTCCA | C/T |
| | 32349 | AGAAATTGGATACATATTA | |
| | | CTGTGTACCAAATATTATA | |
| | | GTCAGTGCTGATGTCAGGA | |
| | | TCACTAGTGAATTAAGAGT | |
| | | CAAATGGAGAAACAGACAT | |
| | | GGAAACGGGAATGCAGACT | |
| | | ATGATGTAACAAAGAACAT | |
| | | CTGGATAAAGCTGAAAGAA | |
| | | GGTCATACAAGATTAACAG | |
| | | TGGTGCCAGGTCTGACGCA | |
| | | TTGGAGGCAAGTGACAAAT | |
| | | ATCTAATAGGTGAATGAAT | |
| | | GAA | |
| | | AACTCATAAATGATTTTTT | |
| | | GAAATTTCTTTTAAAAATG | |
| | | AGTTTGATTTTAATTTACT | |
| | | AATCAATTAAAGATAGAAT | |
| | | TTATGGGAAAATGGAAAAC | |
| | | TCTGGCAGGGTCACAGTTT | |
| | | GTAGACTGATACAAAAGGA | |
| | | GATATATTTCTATCAATGA | |
| | | AATTGTTTGATACAATCAG | |
| | | GACACTTTAAGATCCTTAA | |
| | | AAATTATTCAGAGCCCAAA | |
| | | AGAGCTTTTATTTTTGTAG | |
| | | GCTAAAGTCCTTAACATTT | |
| | | AC | |

(SEQ ID NO: 351)

| | | | |
|---|---|---|---|
| 354162 | SCAFFOLD220007_ | TGATGTCAGGATCACTAGT | T/G |
| | 32284 | GAATTAAGAGTCAAATGGA | |
| | | GAAACAGACATGGAAACGG | |
| | | GAATGCAGACTATGATGTA | |
| | | ACAAAGAACATCTGGATAA | |
| | | AGCTGAAAGAAGGTCATAC | |
| | | AAGATTAACAGTGGTGCCA | |
| | | GGTCTGACGCATTGGAGGC | |
| | | AAGTGACAAATATCTAATA | |
| | | GGTGAATGAATGAACAACT | |
| | | CATAAAATGATTTTTTGAA | |
| | | ATTTCTTTTAAAAATGAGT | |
| | | TTGATTTTAATTTACTAAT | |
| | | CAA | |
| | | TAAAGATAGAATTTATGGG | |
| | | AAAATGGAAAACTCTGGCA | |
| | | GGGTCACAGTTTGTAGACT | |
| | | GATACAAAAGGAGATATAT | |
| | | TTCTATCAATGAAATTGTT | |
| | | TGATACAATCAGGACACTT | |
| | | TAAGATCCTTAAAAATTAT | |
| | | TCAGAGCCCAAAAGAGCTT | |
| | | TTATTTTTGTAGGCTAAAG | |
| | | TCCTTAACATTTACCTTCT | |
| | | TAGAAATTCAAACTAAGAA | |
| | | CTCTAAAAAGATATTTATT | |
| | | CATTTTAAACAAAAATAAA | |
| | | CTCA | |

TABLE 16
A further set of loci associated with high intramuscular fat. Snp_id is the ParAllele
SNP identifier, scaffold-v2 is the version 2 scaffold, bp is the location of the SNP in the
scaffold, bases is the alternative bases in the SNP, mean0 is the mean of the genotype higher up
in the with the alphabet, SE is the standard error of the mean, N is the total sample size, Freq
is the frequency of the 0 allele, a is half the distance between the homozygotes, k is the
dominance effect, a is the average effect of allele substitution in residual RBY, tmax is the t
test between the genotypes with the biggest difference in residual RBY and PermP is the P value
resulting from of 100,000 permutations of the data. These may be correlated with the DNA
sequence (and SEQ ID NO:) by reference to Table 17, where the SNP identification numbers (first
column in Table 17) are listed in ascending, numerical order.

| snp_id | scaffold-v2 | bp | bases | | mean0 | SE | mean1 | SE | mean2 | SE |
|---|---|---|---|---|---|---|---|---|---|---|
| 352783 | Un.637 | 282951 | C/T | 352783 | 0.11 | 0.14 | −0.58 | 0.15 | −0.06 | 0.29 |
| 350590 | 27.26 | 213231 | C/T | 350590 | 0.11 | 0.14 | −0.07 | 0.18 | −0.75 | 0.19 |
| 347369 | Un.8032 | 21710 | C/T | 347369 | 0.20 | 0.22 | −0.50 | 0.12 | 0.08 | 0.33 |
| 349456 | Un.516 | 288740 | G/T | 349456 | 0.28 | 0.14 | NaN | NaN | −0.40 | 0.14 |
| 349616 | 13.44 | 87079 | C/T | 349616 | −0.25 | 0.11 | 0.62 | 0.27 | −0.87 | 0.27 |
| 351687 | Un.5261 | 28632 | A/G | 351687 | 0.83 | 0.41 | −0.37 | 0.14 | −0.02 | 0.14 |
| 353318 | 28.47 | 47391 | A/C | 353318 | −0.32 | 0.15 | 0.49 | 0.21 | −0.51 | 0.23 |
| 345109 | Un.3135 | 56803 | A/G | 345109 | −0.15 | 0.11 | −0.11 | 0.30 | 1.36 | 0.81 |
| 350915 | Un.528 | 414390 | A/G | 350915 | −0.06 | 0.17 | −0.37 | 0.13 | 0.56 | 0.28 |
| 343916 | Un.10004 | 12767 | A/G | 343916 | −0.08 | 0.13 | −0.17 | 0.15 | 1.85 | 0.80 |
| 351993 | Un.1858 | 13608 | C/T | 351993 | −1.15 | 0.26 | −0.05 | 0.18 | 0.02 | 0.12 |
| 352221 | Un.4383 | 55920 | A/T | 352221 | −0.08 | 0.13 | −0.31 | 0.16 | 0.72 | 0.38 |
| 353634 | Un.932 | 29516 | C/T | 353634 | 0.04 | 0.12 | −0.08 | 0.21 | −1.15 | 0.38 |
| 345655 | 25.76 | 437300 | G/T | 345655 | 0.32 | 0.35 | 0.22 | 0.18 | −0.47 | 0.12 |
| 347176 | 1.128 | 533301 | A/G | 347176 | 0.21 | 0.15 | −0.54 | 0.16 | −0.14 | 0.21 |
| 352760 | Un.2361 | 101930 | A/G | 352760 | 1.33 | 0.83 | −0.38 | 0.15 | −0.01 | 0.13 |
| 348968 | Un.156 | 58421 | A/C | 348968 | −0.07 | 0.12 | −0.34 | 0.19 | 2.02 | 0.44 |
| 345554 | Un.4168 | 46080 | C/T | 345554 | −0.06 | 0.62 | −0.61 | 0.14 | 0.11 | 0.13 |
| 342512 | Un.227 | 375024 | C/T | 342512 | −0.12 | 0.12 | −0.24 | 0.21 | 1.24 | 0.49 |
| 344894 | Un.2361 | 102194 | C/G | 344894 | −0.00 | 0.13 | −0.39 | 0.15 | 1.33 | 0.83 |
| 353039 | Un.11559 | 12577 | A/C | 353039 | −0.03 | 0.26 | −0.39 | 0.13 | 0.33 | 0.23 |
| 353800 | 17.16 | 123090 | A/T | 353800 | 2.08 | 0.82 | 0.42 | 0.23 | −0.26 | 0.11 |
| 354182 | 4.151 | 1228627 | C/T | 354182 | −0.31 | 0.11 | 0.35 | 0.21 | 0.28 | 0.60 |
| 348929 | 7.66 | 112309 | C/T | 348929 | −0.04 | 0.12 | −0.52 | 0.19 | 1.12 | 0.63 |
| 354184 | Un.516 | 289120 | A/C | 354184 | −0.40 | 0.14 | NaN | NaN | 0.26 | 0.14 |
| 354414 | 3.83 | 50176 | C/T | 354414 | −0.05 | 0.26 | −0.37 | 0.13 | 0.33 | 0.20 |
| 346388 | Un.17378 | 2907 | A/G | 346388 | −0.06 | 0.30 | −0.48 | 0.15 | 0.14 | 0.15 |
| 349564 | 9.37 | 408918 | A/G | 349564 | −0.79 | 0.22 | −0.06 | 0.15 | 0.17 | 0.16 |
| 351131 | 17.2 | 175491 | A/C | 351131 | −0.16 | 0.10 | 1.32 | 0.80 | NaN | NaN |
| 347617 | 12.46 | 349451 | C/T | 347617 | 0.76 | 0.41 | −0.28 | 0.14 | −0.09 | 0.15 |
| 347981 | 1.93 | 40166 | C/T | 347981 | 0.04 | 0.17 | 0.07 | 0.16 | −0.72 | 0.21 |
| 344620 | 30.26 | 11716 | G/T | 344620 | −0.01 | 0.12 | −0.68 | 0.23 | 0.11 | 0.68 |
| 344645 | Un.518 | 312470 | A/G | 344645 | −0.06 | 0.53 | 0.48 | 0.22 | −0.23 | 0.12 |
| 343505 | 5.166 | 168656 | A/G | 343505 | 0.87 | 0.48 | −0.44 | 0.20 | −0.09 | 0.12 |
| 348415 | 10.153 | 1965179 | A/G | 348415 | 1.10 | 0.56 | −0.07 | 0.16 | −0.23 | 0.13 |
| 343071 | Un.306 | 264740 | A/G | 343071 | 1.17 | 0.54 | −0.02 | 0.51 | −0.21 | 0.10 |
| 343076 | 9.129 | 93921 | A/G | 343076 | 0.03 | 0.19 | 0.22 | 0.20 | −0.53 | 0.16 |
| 353926 | NULL | NULL | C/T | 353926 | 0.02 | 0.11 | −1.18 | 0.28 | 0.15 | 0.23 |
| 348572 | Un.516 | 289241 | C/T | 348572 | −0.39 | 0.14 | NaN | NaN | 0.23 | 0.14 |
| 353896 | Un.25 | 701897 | C/T | 353896 | 1.18 | 0.78 | 0.05 | 0.27 | −0.19 | 0.10 |
| 348185 | 2.162 | 167169 | C/G | 348185 | −0.17 | 0.12 | −0.14 | 0.20 | 1.02 | 0.37 |
| 352138 | 2.96 | 311148 | C/G | 352138 | −0.01 | 0.12 | −0.52 | 0.16 | 0.94 | 0.72 |
| 345838 | 24.58 | 150701 | A/G | 345838 | −0.28 | 0.13 | 0.34 | 0.19 | −0.23 | 0.44 |
| 346372 | 25.91 | 858266 | A/G | 346372 | −0.18 | 0.12 | −0.22 | 0.18 | 0.73 | 0.35 |
| 347168 | 13.53 | 215094 | A/G | 347168 | −0.38 | 0.15 | 0.37 | 0.22 | −0.23 | 0.16 |
| 342743 | 19.45 | 442850 | C/T | 342743 | −0.03 | 0.14 | 0.09 | 0.20 | −1.00 | 0.21 |
| 354282 | Un.2920 | 36226 | C/T | 354282 | 0.04 | 0.17 | 0.11 | 0.17 | −0.55 | 0.18 |
| 342778 | 22.85 | 150222 | C/T | 342778 | −0.24 | 0.11 | 0.52 | 0.41 | 1.12 | 0.62 |
| 342709 | Un.4773 | 38302 | C/T | 342709 | −0.26 | 0.11 | 0.40 | 0.25 | −0.14 | 0.42 |
| 353681 | Un.11581 | 11098 | C/T | 353681 | 0.07 | 0.13 | −0.54 | 0.16 | 0.40 | 0.38 |
| 348459 | Un.6824 | 3277 | A/G | 348459 | 0.03 | 0.21 | −0.40 | 0.14 | 0.28 | 0.20 |
| 351663 | Un.6724 | 20355 | C/T | 351663 | 0.06 | 0.22 | −0.40 | 0.14 | 0.24 | 0.18 |
| 353643 | 3.19 | 93615 | C/G | 353643 | −0.10 | 0.18 | −0.30 | 0.15 | 0.36 | 0.21 |
| 351089 | 27.3 | 318658 | C/G | 351089 | −0.69 | 0.22 | 0.07 | 0.16 | 0.04 | 0.16 |
| 344880 | Un.9044 | 12820 | C/T | 344880 | −0.02 | 0.30 | −0.35 | 0.13 | 0.22 | 0.18 |
| 350721 | 25.32 | 172400 | C/T | 350721 | 0.16 | 0.14 | −0.24 | 0.17 | −0.71 | 0.28 |
| 353868 | Un.4123 | 3772 | A/G | 353868 | 1.46 | 0.42 | 0.09 | 0.25 | −0.17 | 0.11 |
| 346220 | Un.5571 | 12011 | G/T | 346220 | −0.16 | 0.31 | −1.30 | 0.33 | −0.04 | 0.11 |
| 354055 | Un.789 | 46267 | C/T | 354055 | −0.15 | 0.11 | −0.63 | 0.12 | 0.34 | 0.36 |
| 342518 | 26.7 | 229556 | C/T | 342518 | 0.01 | 0.14 | −0.40 | 0.15 | 0.91 | 0.62 |
| 342896 | Un.3818 | 47739 | A/G | 342896 | −0.32 | 0.16 | 0.46 | 0.24 | −0.06 | 0.21 |
| 344366 | 22.2 | 325125 | C/G | 344366 | 0.07 | 0.50 | 0.36 | 0.22 | −0.27 | 0.12 |
| 348325 | Un.2742 | 92194 | A/G | 348325 | −0.26 | 0.14 | 0.42 | 0.19 | −0.38 | 0.18 |
| 351334 | 5.1 | 1504709 | C/T | 351334 | −0.01 | 0.23 | 0.07 | 0.13 | −0.59 | 0.17 |
| 352556 | Un.5582 | 16606 | A/C | 352556 | 0.26 | 0.23 | 2.18 | 0.87 | −0.23 | 0.12 |
| 352985 | Un.2169 | 113582 | A/G | 352985 | −0.13 | 0.17 | −0.31 | 0.14 | 0.35 | 0.24 |
| 350226 | Un.1554 | 186089 | A/T | 350226 | 0.80 | 0.37 | −0.17 | 0.16 | −0.18 | 0.14 |
| 349583 | 4.96 | 282594 | A/G | 349583 | 0.84 | 0.64 | −0.59 | 0.19 | −0.04 | 0.12 |
| 348246 | 4.8 | 787563 | C/T | 348246 | −0.17 | 0.10 | 0.77 | 0.43 | NaN | NaN |
| 349492 | Un.1441 | 108562 | C/T | 349492 | −0.09 | 0.17 | −0.29 | 0.15 | 0.47 | 0.23 |
| 345395 | Un.5582 | 16471 | A/C | 345395 | −0.18 | 0.17 | −0.28 | 0.14 | 0.43 | 0.25 |
| 349106 | Un.7325 | 25630 | C/T | 349106 | 0.18 | 0.17 | −0.06 | 0.15 | −0.59 | 0.23 |
| 349116 | Un.12818 | 12550 | C/T | 349116 | −0.04 | 0.17 | 0.11 | 0.17 | −0.60 | 0.14 |
| 354174 | 14.43 | 675522 | G/T | 354174 | −0.18 | 0.42 | −0.50 | 0.14 | 0.14 | 0.14 |
| 342524 | Un.10647 | 15369 | C/T | 342524 | −0.16 | 0.12 | −0.26 | 0.23 | 0.68 | 0.36 |
| 349299 | Un.434 | 223954 | A/C | 349299 | −0.46 | 0.17 | 0.25 | 0.17 | −0.20 | 0.16 |
| 353752 | Un.5582 | 16662 | C/T | 353752 | −0.18 | 0.17 | −0.28 | 0.14 | 0.43 | 0.25 |
| 343971 | Un.1944 | 36477 | C/T | 343971 | −0.17 | 0.12 | −0.16 | 0.17 | 1.00 | 0.58 |
| 346305 | 28.4 | 29606 | A/C | 346305 | −0.27 | 0.18 | −0.47 | 0.13 | 0.16 | 0.16 |
| 353054 | 15.86 | 331848 | A/G | 353054 | 2.01 | 0.59 | −0.48 | 0.25 | −0.05 | 0.11 |
| 353060 | Un.5582 | 16876 | C/T | 353060 | 0.43 | 0.25 | −0.28 | 0.14 | −0.18 | 0.17 |
| 343405 | 18.146 | 566661 | A/G | 343405 | −0.28 | 0.28 | 0.20 | 0.18 | −0.45 | 0.17 |
| 346429 | Un.12818 | 12728 | C/T | 346429 | −0.04 | 0.17 | 0.10 | 0.16 | −0.60 | 0.14 |
| 348275 | Un.1926 | 37849 | G/T | 348275 | 0.15 | 0.17 | −0.48 | 0.15 | 0.20 | 0.21 |
| 345839 | 15.128 | 6678 | A/G | 345839 | 0.13 | 0.14 | −0.53 | 0.14 | −0.31 | 0.30 |
| 351743 | Un.789 | 45942 | A/C | 351743 | −0.13 | 0.15 | −0.26 | 0.15 | 0.58 | 0.31 |
| 345160 | 17.77 | 230082 | A/C | 345160 | −0.31 | 0.12 | −0.04 | 0.19 | 0.49 | 0.30 |
| 346062 | Un.2716 | 5535 | A/G | 346062 | −0.02 | 0.16 | −0.41 | 0.15 | 0.32 | 0.26 |
| 352701 | 8.52 | 958 | A/C | 352701 | 0.25 | 0.18 | −0.40 | 0.16 | −0.01 | 0.19 |
| 350780 | 28.64 | 36585 | A/G | 350780 | −0.17 | 0.31 | −0.40 | 0.16 | 0.18 | 0.15 |
| 351863 | Un.10682 | 6600 | A/G | 351863 | 2.08 | 1.01 | 0.29 | 0.37 | −0.15 | 0.11 |
| 350519 | Un.11 | 1156244 | C/T | 350519 | 0.23 | 0.16 | −0.33 | 0.15 | −0.32 | 0.30 |
| 345464 | Un.42231 | 1024 | C/T | 345464 | −0.16 | 0.11 | 0.98 | 0.39 | −0.63 | 0.41 |
| 351654 | Un.5066 | 4868 | C/T | 351654 | −0.02 | 0.12 | −0.47 | 0.17 | 1.13 | 0.77 |
| 354135 | Un.7528 | 36561 | A/T | 354135 | 0.29 | 0.25 | 0.06 | 0.18 | −0.34 | 0.12 |
| 347988 | 4.136 | 966787 | G/T | 347988 | −0.37 | 0.14 | 0.19 | 0.17 | 0.03 | 0.33 |
| 348126 | Un.1825 | 148535 | C/T | 348126 | 0.10 | 0.30 | 0.44 | 0.29 | −0.24 | 0.11 |
| 352915 | NULL | NULL | G/T | 352915 | 0.01 | 0.15 | −0.45 | 0.16 | 0.22 | 0.21 |
| 349323 | Un.114 | 438261 | C/G | 349323 | −0.08 | 0.12 | 0.19 | 0.22 | −1.75 | 0.55 |
| 351593 | 3.12 | 84976 | C/T | 351593 | −0.23 | 0.10 | 0.55 | 0.31 | −1.25 | NaN |
| 347802 | 25.5 | 15756 | A/G | 347802 | 0.13 | 0.67 | 0.39 | 0.23 | −0.23 | 0.11 |
| 350996 | NULL | NULL | C/T | 350996 | −0.50 | 0.19 | 0.27 | 0.17 | −0.18 | 0.16 |
| 349235 | Un.4539 | 42294 | A/G | 349235 | 1.89 | 1.19 | 0.11 | 0.30 | −0.17 | 0.11 |
| 351065 | Un.8255 | 16739 | A/G | 351065 | 0.35 | 0.27 | −0.59 | 0.20 | −0.03 | 0.12 |
| 343441 | 5.169 | 996113 | A/G | 343441 | −0.00 | 0.28 | −0.35 | 0.14 | 0.23 | 0.17 |
| 343516 | 29.3 | 130941 | A/G | 343516 | −0.16 | 0.17 | 0.19 | 0.17 | −0.48 | 0.16 |
| 342993 | 17.23 | 446279 | A/G | 342993 | −0.08 | 0.13 | −0.33 | 0.16 | 0.83 | 0.45 |
| 349117 | Un.12818 | 12771 | A/G | 349117 | −0.04 | 0.17 | 0.09 | 0.17 | −0.60 | 0.14 |
| 346498 | 12.66 | 188317 | A/G | 346498 | 0.30 | 0.18 | −0.46 | 0.18 | −0.04 | 0.14 |
| 346312 | 4.69 | 62348 | A/G | 346312 | NaN | NaN | 0.59 | 0.38 | −0.18 | 0.10 |
| 346497 | Un.1794 | 106945 | A/C | 346497 | −0.65 | 0.26 | −0.14 | 0.19 | 0.11 | 0.14 |
| 343880 | Un.2336 | 110695 | C/T | 343880 | −0.01 | 0.13 | −0.53 | 0.19 | 0.45 | 0.36 |
| 345945 | 16.21 | 272163 | C/T | 345945 | −0.43 | 0.14 | 0.16 | 0.17 | −0.07 | 0.24 |
| 345210 | 26.6 | 495904 | C/T | 345210 | −0.39 | 0.12 | 0.20 | 0.19 | −0.14 | 0.25 |
| 354455 | 8.1 | 229378 | C/T | 354455 | 0.20 | 0.59 | −0.51 | 0.19 | 0.06 | 0.12 |
| 350589 | 6.111 | 493692 | A/C | 350589 | −0.22 | 0.11 | −0.07 | 0.21 | 0.62 | 0.48 |
| 351724 | 3.114 | 11398 | A/G | 351724 | −0.14 | 0.13 | 0.27 | 0.20 | −0.77 | 0.32 |

| snp_id | N | Freq | a | −k | alpha | tmax | PermP |
|---|---|---|---|---|---|---|---|
| 352783 | 162 | 0.78 | 0.09 | −7.10 | −0.25 | 2.91 | 0.0009 |
| 350590 | 163 | 0.66 | 0.43 | 0.58 | 0.51 | 3.06 | 0.0010 |
| 347369 | 135 | 0.61 | 0.06 | −11.38 | −0.09 | 2.96 | 0.0011 |
| 349456 | 162 | 0.48 | 0.34 | NaN | NaN | 3.37 | 0.0011 |
| 349616 | 162 | 0.85 | 0.31 | 3.83 | 1.15 | 3.55 | 0.0011 |
| 351687 | 163 | 0.25 | 0.43 | −1.83 | 0.82 | 3.27 | 0.0013 |
| 353318 | 143 | 0.69 | 0.10 | 9.46 | 0.44 | 3.23 | 0.0014 |
| 345109 | 163 | 0.89 | −0.76 | 0.94 | −1.31 | 3.09 | 0.0016 |
| 350915 | 161 | 0.60 | −0.31 | 2.00 | −0.43 | 3.30 | 0.0016 |
| 343916 | 159 | 0.86 | −0.97 | 1.09 | −1.73 | 3.62 | 0.0017 |
| 351993 | 163 | 0.29 | −0.58 | −0.87 | −0.80 | 3.23 | 0.0017 |
| 352221 | 161 | 0.71 | −0.40 | 1.57 | −0.66 | 2.99 | 0.0017 |
| 353634 | 162 | 0.77 | 0.59 | 0.81 | 0.85 | 3.22 | 0.0017 |
| 345655 | 159 | 0.32 | 0.39 | 0.75 | 0.29 | 3.26 | 0.0018 |
| 347176 | 163 | 0.71 | 0.17 | −3.29 | −0.07 | 3.28 | 0.0018 |
| 352760 | 162 | 0.22 | 0.67 | −1.56 | 1.25 | 3.27 | 0.0018 |
| 348968 | 163 | 0.89 | −1.04 | 1.25 | −2.06 | 3.73 | 0.0019 |
| 345554 | 163 | 0.17 | −0.09 | 7.29 | 0.33 | 3.16 | 0.0021 |
| 342512 | 156 | 0.80 | −0.68 | 1.17 | −1.17 | 3.05 | 0.0024 |
| 344894 | 162 | 0.78 | −0.66 | 1.58 | −1.25 | 3.31 | 0.0024 |
| 353039 | 147 | 0.47 | −0.18 | 3.04 | −0.14 | 2.89 | 0.0024 |
| 353800 | 163 | 0.12 | 1.17 | −0.41 | 1.54 | 3.21 | 0.0025 |
| 354182 | 163 | 0.80 | −0.30 | −1.23 | −0.08 | 3.03 | 0.0027 |
| 348929 | 162 | 0.88 | −0.58 | 1.84 | −1.40 | 3.14 | 0.0028 |
| 354184 | 161 | 0.52 | −0.33 | NaN | NaN | 3.25 | 0.0028 |
| 354414 | 163 | 0.42 | −0.19 | 2.69 | −0.10 | 3.09 | 0.0028 |
| 346388 | 154 | 0.36 | −0.10 | 5.24 | 0.05 | 2.83 | 0.0029 |
| 349564 | 158 | 0.37 | −0.48 | −0.53 | −0.54 | 3.12 | 0.0032 |
| 351131 | 163 | 0.98 | NaN | NaN | NaN | 3.17 | 0.0034 |
| 347617 | 162 | 0.27 | 0.43 | −1.43 | 0.71 | 3.04 | 0.0035 |
| 347981 | 162 | 0.63 | 0.38 | 1.06 | 0.48 | 2.93 | 0.0035 |
| 344620 | 154 | 0.88 | −0.06 | 12.61 | −0.61 | 2.24 | 0.0036 |
| 344645 | 162 | 0.14 | 0.09 | 7.22 | −0.37 | 2.83 | 0.0036 |
| 343505 | 159 | 0.13 | 0.48 | −1.71 | 1.09 | 2.97 | 0.0038 |
| 348415 | 162 | 0.26 | 0.66 | −0.75 | 0.91 | 2.91 | 0.0038 |
| 343071 | 149 | 0.09 | 0.69 | −0.72 | 1.09 | 3.14 | 0.0039 |
| 343076 | 150 | 0.54 | 0.28 | 1.69 | 0.31 | 2.79 | 0.0039 |
| 353926 | 161 | 0.94 | −0.07 | 18.83 | −1.18 | 3.18 | 0.0039 |
| 348572 | 162 | 0.51 | −0.31 | NaN | NaN | 3.02 | 0.0040 |
| 353896 | 163 | 0.14 | 0.68 | −0.64 | 1.00 | 2.88 | 0.0040 |
| 348185 | 163 | 0.78 | −0.60 | 0.95 | −0.92 | 3.04 | 0.0043 |
| 352138 | 163 | 0.83 | −0.47 | 2.07 | −1.13 | 3.11 | 0.0043 |
| 345838 | 163 | 0.79 | −0.03 | −22.89 | 0.32 | 2.82 | 0.0044 |
| 346372 | 163 | 0.69 | −0.46 | 1.09 | −0.64 | 3.03 | 0.0044 |
| 347168 | 153 | 0.50 | −0.08 | −8.61 | −0.08 | 2.79 | 0.0044 |
| 342743 | 154 | 0.69 | 0.49 | 1.24 | 0.72 | 3.18 | 0.0047 |
| 354282 | 162 | 0.56 | 0.30 | 1.22 | 0.35 | 2.59 | 0.0047 |
| 342778 | 137 | 0.86 | −0.68 | −0.12 | −0.62 | 3.07 | 0.0048 |
| 342709 | 156 | 0.81 | −0.06 | −10.09 | 0.32 | 2.77 | 0.0049 |
| 353681 | 163 | 0.79 | −0.16 | 4.76 | −0.62 | 2.70 | 0.0050 |
| 348459 | 163 | 0.51 | −0.12 | 4.42 | −0.14 | 2.89 | 0.0051 |
| 351663 | 161 | 0.52 | −0.09 | 5.94 | −0.12 | 2.83 | 0.0051 |
| 353643 | 163 | 0.57 | −0.23 | 1.88 | −0.29 | 2.60 | 0.0051 |
| 351089 | 162 | 0.42 | −0.36 | −1.08 | −0.43 | 2.73 | 0.0052 |
| 344880 | 162 | 0.39 | −0.12 | 3.81 | −0.02 | 2.64 | 0.0055 |
| 350721 | 163 | 0.71 | 0.43 | 0.09 | 0.45 | 2.61 | 0.0055 |
| 353868 | 163 | 0.11 | 0.82 | −0.67 | 1.25 | 2.76 | 0.0055 |
| 346220 | 152 | 0.04 | −0.06 | 19.48 | 1.05 | 2.72 | 0.0057 |
| 354055 | 145 | 0.89 | −0.25 | 2.94 | −0.81 | 2.75 | 0.0057 |
| 342518 | 159 | 0.81 | −0.45 | 1.92 | −0.97 | 2.86 | 0.0058 |
| 342896 | 129 | 0.60 | −0.13 | −5.18 | 0.01 | 2.82 | 0.0058 |
| 344366 | 162 | 0.20 | 0.17 | 2.68 | −0.11 | 2.74 | 0.0058 |
| 348325 | 163 | 0.74 | 0.06 | 12.79 | 0.41 | 2.83 | 0.0058 |
| 351334 | 158 | 0.57 | 0.29 | 1.28 | 0.35 | 2.84 | 0.0058 |
| 352556 | 134 | 0.19 | 0.24 | 8.86 | −1.09 | 3.20 | 0.0058 |
| 352985 | 163 | 0.58 | −0.24 | 1.76 | −0.31 | 2.57 | 0.0060 |
| 350226 | 163 | 0.32 | 0.49 | −0.97 | 0.66 | 2.77 | 0.0061 |
| 349583 | 161 | 0.09 | 0.44 | −2.25 | 1.26 | 2.84 | 0.0063 |
| 348246 | 162 | 0.95 | NaN | NaN | NaN | 2.77 | 0.0064 |
| 349492 | 160 | 0.58 | −0.28 | 1.74 | −0.36 | 2.73 | 0.0064 |
| 345395 | 163 | 0.55 | −0.31 | 1.33 | −0.35 | 2.70 | 0.0065 |
| 349106 | 162 | 0.56 | 0.38 | 0.39 | 0.40 | 2.69 | 0.0065 |
| 349116 | 160 | 0.64 | 0.28 | 1.55 | 0.40 | 2.69 | 0.0065 |
| 354174 | 160 | 0.19 | −0.16 | 3.02 | 0.14 | 2.82 | 0.0065 |
| 342524 | 153 | 0.72 | −0.42 | 1.23 | −0.65 | 2.85 | 0.0066 |
| 349299 | 163 | 0.36 | −0.13 | −4.44 | −0.29 | 2.56 | 0.0066 |
| 353752 | 163 | 0.55 | −0.31 | 1.33 | −0.35 | 2.70 | 0.0066 |
| 343971 | 163 | 0.74 | −0.58 | 0.99 | −0.86 | 2.95 | 0.0067 |
| 346305 | 159 | 0.25 | −0.21 | 1.94 | −0.00 | 2.72 | 0.0068 |
| 353054 | 162 | 0.10 | 1.03 | −1.41 | 2.19 | 3.15 | 0.0068 |
| 353060 | 163 | 0.45 | 0.31 | −1.33 | 0.35 | 2.70 | 0.0068 |
| 343405 | 138 | 0.44 | 0.08 | 6.65 | 0.02 | 2.55 | 0.0069 |
| 346429 | 163 | 0.64 | 0.28 | 1.48 | 0.40 | 2.71 | 0.0070 |
| 348275 | 163 | 0.54 | −0.03 | 24.43 | −0.08 | 2.76 | 0.0070 |
| 345839 | 161 | 0.80 | 0.22 | −2.00 | −0.04 | 2.84 | 0.0071 |
| 351743 | 163 | 0.63 | −0.36 | 1.37 | −0.48 | 2.68 | 0.0071 |
| 345160 | 159 | 0.66 | −0.40 | 0.32 | −0.44 | 2.90 | 0.0072 |
| 346062 | 162 | 0.68 | −0.17 | 3.34 | −0.37 | 2.64 | 0.0074 |
| 352701 | 162 | 0.45 | 0.13 | −4.00 | 0.18 | 2.72 | 0.0074 |
| 350780 | 163 | 0.32 | −0.17 | 2.38 | −0.02 | 2.66 | 0.0075 |
| 351863 | 161 | 0.05 | 1.11 | −0.60 | 1.72 | 2.94 | 0.0075 |
| 350519 | 162 | 0.65 | 0.27 | −1.04 | 0.18 | 2.55 | 0.0077 |
| 345464 | 162 | 0.95 | 0.24 | 5.78 | 1.47 | 2.80 | 0.0080 |
| 351654 | 158 | 0.88 | −0.58 | 1.78 | −1.36 | 2.76 | 0.0081 |
| 354135 | 150 | 0.37 | 0.32 | 0.28 | 0.29 | 2.52 | 0.0081 |
| 347988 | 161 | 0.65 | −0.20 | −1.80 | −0.09 | 2.62 | 0.0083 |
| 348126 | 163 | 0.18 | 0.17 | 2.94 | −0.15 | 2.60 | 0.0083 |
| 352915 | 154 | 0.70 | −0.11 | 5.42 | −0.33 | 2.51 | 0.0083 |
| 349323 | 162 | 0.87 | 0.83 | 1.33 | 1.66 | 2.93 | 0.0084 |
| 351593 | 158 | 0.90 | 0.51 | 2.52 | 1.54 | 3.00 | 0.0084 |
| 347802 | 163 | 0.15 | 0.18 | 2.44 | −0.13 | 2.53 | 0.0085 |
| 350996 | 159 | 0.38 | −0.16 | −3.70 | −0.31 | 2.64 | 0.0086 |
| 349235 | 162 | 0.09 | 1.03 | −0.73 | 1.64 | 2.78 | 0.0087 |
| 351065 | 163 | 0.13 | 0.19 | −3.90 | 0.73 | 2.70 | 0.0088 |
| 343441 | 162 | 0.44 | −0.11 | 4.02 | −0.06 | 2.65 | 0.0089 |
| 343516 | 163 | 0.58 | 0.16 | 3.25 | 0.24 | 2.51 | 0.0089 |
| 342993 | 155 | 0.70 | −0.45 | 1.55 | −0.74 | 2.95 | 0.0092 |
| 349117 | 162 | 0.65 | 0.28 | 1.45 | 0.40 | 2.65 | 0.0092 |
| 346498 | 162 | 0.23 | 0.17 | −3.45 | 0.49 | 2.72 | 0.0093 |
| 346312 | 163 | 0.06 | NaN | NaN | NaN | 2.54 | 0.0095 |
| 346497 | 159 | 0.32 | −0.38 | −0.34 | −0.42 | 2.55 | 0.0095 |
| 343880 | 159 | 0.72 | −0.23 | 3.28 | −0.56 | 2.64 | 0.0096 |
| 345945 | 161 | 0.57 | −0.18 | −2.28 | −0.12 | 2.52 | 0.0096 |
| 345210 | 151 | 0.56 | −0.12 | −3.86 | −0.06 | 2.62 | 0.0097 |
| 354455 | 159 | 0.19 | 0.07 | −9.19 | 0.46 | 2.41 | 0.0099 |
| 350589 | 162 | 0.75 | −0.42 | 0.64 | −0.56 | 2.65 | 0.0100 |
| 351724 | 163 | 0.76 | 0.31 | 2.32 | 0.70 | 2.63 | 0.0100 |

TABLE 17

DNA sequences for each of the SNP ID in
Table 16.

| | | | |
|---|---|---|---|
| | | 5′flanking | |
| | | sequence | 3′ |
| | scaffold-v1/ | alternative | flanking |
| Snp_id | IBISS4 | bases | sequence |

SEQ ID NO: 352

| | | | |
|---|---|---|---|
| 342512 | SCAFFOLD | TATCTATCATGTCCCTGTCTTT | T/C |
| | 141737_19472 | TCTTTCTAAGGCATTTCCTGAG | |
| | | TCTCTGCACAGCTGAAATAGTT | |
| | | CCCTTATTAAGTAACCTTTTTC | |
| | | CACCTTCATTCCCCTTCAGGCT | |
| | | TCCCTGTGACCCCAGTTGAATA | |
| | | GTACCACATTGGGTTTCCTTGT | |
| | | GGGGGTGAAGACTTTGCGGTCC | |
| | | TTTCTCCAGATCAGCAGAAATA | |
| | | TGCATCTAGGAAACCAAACGAG | |
| | | CGTCTCTGAATTCCTCCTCCTG | |
| | | GGACTCT | |
| | | CACCCAACCTGAGCAGCAGGAG | |
| | | CTCCTCTTTGCGCTTTTCCTGG | |
| | | CTATGTACCTGGCCACCGTGGT | |
| | | GGGGAATGGGCTCATCGTTCTG | |
| | | GCCATCGGCTTGGACTCTTACC | |
| | | TTCACACCCCCATGTACCTCTT | |
| | | CCTCGCCAACCTAGCCTTTGCT | |
| | | GATATTTTTTCCATTTCCACCT | |
| | | CAGTCCCCAAAATGCTGATGAA | |
| | | TATTCAGACCAAGAGTCCATCC | |
| | | ATCTCCTATGAGAGCTGCGTCA | |
| | | CACAGATG | |

SEQ ID NO: 353

| | | | |
|---|---|---|---|
| 342518 | SCAFFOLD | CACAATACATGGTGGGAAGGCC | T/C |
| | 160139_23346 | AGGGGACTCAGAGTTCAGAGAC | |
| | | TGGGTTTCTGACCTTCTTTGCC | |
| | | ATTTTTTGCATTTGGTGCTTTG | |
| | | TGCTAAGTTGCTTCAGTCATGT | |
| | | CCGACTCTGTGCAACCCTATGA | |
| | | GCTATAGCCCGCCAGGCTCCTC | |
| | | TGTCCATGGGATTCTCCAGGCA | |
| | | AGAATACTGGAGTGAATTGCCA | |
| | | TTCCCTTCTCCAGGGGATCTTC | |
| | | CTAACCCAGGGATCGAGCCGGT | |
| | | GTGTCTTA | |
| | | GTCGAACCTGCATTGGCAGGCA | |
| | | GGTTCTTTACCACTAGCGCCAC | |
| | | GTGGGAAGCCCTTTTACGTTTG | |
| | | GGCTCTGGGTTAATTCACTCTT | |
| | | TGCCAATGTTCTTGCCTCTTGA | |
| | | TGCTTAATTCAAGCACCTTAAT | |
| | | TCAGCACTGACTTTATTCACAG | |
| | | AAAACAGTCTTCAGAACTGTGG | |
| | | ATTCTGTGCTGGGACTGTGCAG | |
| | | TGTTATCATTTCTTTTGAACTC | |
| | | CAGGTTATTTTGAAAACATGGG | |
| | | GTGTGTGT | |

SEQ ID NO: 354

| | | | |
|---|---|---|---|
| 342524 | SCAFFOLD | CCAGCAGTCCCACAGCTGTCAC | C/T |
| | 164825_5474 | CACGATCCTTTTAAAATCACAA | |
| | | TCTGATTCCATCACTCCCTAAC | |
| | | CTCAAACTTCCAACCACTTCCT | |
| | | ATCACATGTAGAATAAAATCCA | |
| | | AAGATCCTTGCCATAGTCTGGA | |
| | | GACCTTACATGTAGATCCCTGC | |
| | | TTATCAGAGACCTCCCTTCCTT | |
| | | CTGTGTTCACCATTACAGCCGC | |
| | | AGAGTTTTCCTGGATGGGCTCC | |
| | | AAACGTCCCAGGCCAGCATTCC | |
| | | TCCAGGGT | |
| | | GGGGCAGAGTGCTTTCTCCCGA | |
| | | CAGTCCTACACACACCAGAACC | |
| | | CTGCTATCACTCTCTATCCCCT | |
| | | CGCTCCGCTTTATTTCTCTACA | |
| | | CTGCACTCAGGATTATATTACA | |
| | | CACGTATTAGCTATTTCTCTGT | |
| | | ATACCACGTAACCACGAGGGCA | |
| | | GGGGTTGGATCTGTTTTGTTCA | |
| | | CAACTACATCAACAATGCTTAG | |
| | | GAGAGGTCTGGCACAAGATGGT | |
| | | CTCTCCAAAAGTATTTGGAGAG | |
| | | TGAATGAAG | |

SEQ ID NO: 355

| | | | |
|---|---|---|---|
| 342709 | IBISS4snp425 | ACTTTTTACGAGGACCGGGGCT | T/C |
| | | TCCAGGGCCACTGCTACGAGTG | |
| | | CAGCAGGACTGCCCCAACCTGC | |
| | | AGCCCTATTTCAGCCGCTGTAA | |
| | | CTCCATCCGCGT | |

SEQ ID NO: 356

| | | | |
|---|---|---|---|
| 342743 | IBISS4snp643 | CAGCCACTAGGTGGCGCTGCTG | C/T |
| | | AGCCAGGCCCACTCCCCTGGTC | |
| | | CACAGCGGGCCAGCAGTATCCG | |
| | | AAAGTGATTTCCATCCAGACCG | |
| | | ACATCCCTCTGA | |

SEQ ID NO: 357

| | | | |
|---|---|---|---|
| 342778 | IBISS4snp854 | ACTTTGCCCCCTTGTGCATCTT | C/T |
| | | CATAAACCTGCTGTGGGGACTC | |
| | | CTCAGCCGTAGGGGCTCAGGGT | |
| | | TTCCTGAGAGCCAGATGTCCTG | |
| | | CAGAGTTGCTGG | |

SEQ ID NO: 358

| | | | |
|---|---|---|---|
| 342896 | SCAFFOLD | AGGATCATTGCGTTTTTGGCAA | G/A |
| | 166534_2377 | AGAAGGAAACTGTGACTCAGAG | |
| | | GAGGGAAGCTCCTGGCCCAAGG | |
| | | CTGCCCTGAGCAGGAGAGTCGG | |
| | | GTTCGGGTCTGTGGGTCTGACT | |
| | | CTGTCCTTCCAAGTGCTCCAAG | |
| | | ATCTCCTCAGCTCCAGTGCACA | |
| | | CGCTGCAGATGCACAATGCTCA | |
| | | CATTCGCACACATACACATGCA | |
| | | TATGTATGCATGCACATGCACA | |
| | | CACGGCATGCACAAATGCATGC | |
| | | ACACACGC | |
| | | AACATGTATGCAGCCACGTGTA | |
| | | CATACATGGCCCACACAAATAC | |
| | | ATGCACACACATATGTATGCAC | |
| | | GCACATGTATACACATGATACA | |
| | | CACAAATACATGTGTATATATC | |
| | | CGCACACAGACACATATGCACA | |
| | | CATGTACATACATGAACACACA | |
| | | GGTACATAGGCACATGCACACA | |
| | | AACATACGTGCATGCATTCAAA | |
| | | CATACACGTGCACACACATGCA | |
| | | TAAACACGCATGTTTTCACATA | |
| | | CGTGCGTG | |

SEQ ID NO: 359

| | | | |
|---|---|---|---|
| 342993 | SCAFFOLD | AATATTTACAGTCTATGGAAAG | A/G |
| | 261578_4354 | AGGTAACTGACAAAAATGAGAT | |
| | | CTTTTATCACTGTGTCAAAGTA | |
| | | AATACACTGAGAAATATACTAA | |
| | | GATAACTTACTAAGATTACTAA | |
| | | GTGCAAAGCAGAAATCAGACAC | |
| | | AGATTCTAGGTCAAGTTTTTAG | |
| | | CTCAGAGGTTTATTTTGACCAA | |
| | | GGATTGCTTGCACGGTCTTTAA | |
| | | AGGTCACAGAGGTAAACCATGG | |
| | | GAGGGTCACTGGGATGAGACGG | |
| | | GCAATGCT | |
| | | CACAGGTTTCCCTGAGGCCTGA | |
| | | GTGCCATACAATGAAACCGAGT | |
| | | TGAGAACACAGCACTGTTCCGT | |
| | | CAAACTGCCTGATTCAGCAGGT | |
| | | GCTATGAACTGAGCATCAGTGC | |
| | | CCACACAGACAAGGTGGCTCCA | |
| | | GACACAGCAAAAAAGACAACAT | |
| | | GCTGGGAGCCAACGGCAAGAAA | |
| | | CGTCACCATCGTTCTCATTACA | |
| | | GCGATGGCCGCTTCTTCTTTAA | |
| | | TAACACGGTGTCCTTCTACAGA | |
| | | TAAAGTGT | |

SEQ ID NO: 360

| | | | |
|---|---|---|---|
| 343071 | SCAFFOLD | TATGAGATGCAGAATTCCAACG | G/A |
| | 41706_5862 | AATGCAAGAGGAACTTCGTGGC | |
| | | AGTGTATGACGGAAGCAGCTCG | |
| | | GTGGAGGACCTGAAAGCCAAGT | |
| | | TCTGCAGCACGGTGGCCAACGA | |
| | | CGTGATGCTCCGCACGGGGCTC | |
| | | GGGGTCATCCGCATGTGGGCTG | |
| | | ACGAGGGCAGCCGCAACAGCCG | |
| | | CTTCCAGATGCTCTTCACGTCC | |
| | | TTCCAAGAACGTAAGTGTCTCC | |
| | | GCTCTTCGCTGCTCGGCCTTCC | |
| | | AGTGGGTC | |
| | | GAGGGTGCAGATCTCATGCACT | |
| | | GTGAATGGTGTTTCCTTCATGC | |
| | | AGCTTGAGCCTTAATAAGTTGT | |
| | | TCAAACCGCTTAGATTCCCTTT | |
| | | CCTTCTCTTTGATCCAGAAACA | |
| | | GGAGAGTTACATATGGCCTTTT | |
| | | GATTACTTACATCAGCATATGC | |
| | | AGGGCTTCCCTGGTGACTCAGA | |
| | | TGGTAAAGACTCTGCTTGCAAT | |
| | | GCAGGAAACCCGGGTTGGATCC | |
| | | CTGGGTTAGGTAGATTCCCTGG | |
| | | AGTAGGAA | |

SEQ ID NO: 361

| | | | |
|---|---|---|---|
| 343076 | SCAFFOLD | TTATGTCACACCTTTGCAGGTA | A/G |
| | 55505_8978 | AAACAACAAAGCCCATTGATCT | |
| | | TATGAACCCTTTCATAAAATTT | |
| | | GTTCCAAAATAAATAAATCTAT | |
| | | ATTTTGCACCCAGAAGCTTAGT | |
| | | TTGGACAGTCTTTTTACTTGAA | |
| | | TTAATATATAATAACTCCTCTT | |
| | | GATTTGATATAAACAAAACATG | |
| | | AACCCAGGCACATCACCCTCTG | |
| | | CTTTAGACAACAGAGTGAATGA | |
| | | TCAGGCCCTCATCCCCCTCTCT | |
| | | CTGGATAC | |
| | | TACAGTCCAGCCGAGGAGATAA | |
| | | ACACACAGCTATGACTGTAAAG | |
| | | CGGACCTGACCAGAGCCACAGT | |
| | | CACACCAGCCGTGGCAGTTCAG | |
| | | AGTGCCCACGGGGGGAGGCTGT | |
| | | GGACCTCTCACCTGGACGGCAG | |
| | | TGACAAGTCTTGAGATTCACTC | |
| | | CAGACACATCTCAGTTTCTCCT | |
| | | TCATCCACTTCTCCACATGCAT | |
| | | TCTCTCTTCTTCGCTTTCTCAG | |
| | | GAGGTAGGGGTGAGCGCTTTCT | |
| | | ATCTCATA | |

SEQ ID NO: 362

| | | | |
|---|---|---|---|
| 343405 | SCAFFOLD | CCCTCCCTCCCTCCGGCTAATT | G/A |
| | 200102_19625 | CTCTGGAGCGTGGAAACCCACC | |
| | | AAGCTCACTCTCCTGCCTGGGC | |
| | | TTTCAAGACCTCCTCGAGAGGG | |
| | | GGGCCCTGTGGCCTCGTGAGTG | |
| | | GTGCAAGCCCTGTTCTAGGGTT | |
| | | TTACTGGTTCTCTGCATAAACC | |
| | | AGGGAATATTAGCTTCTTTCAA | |
| | | TCTTTCACTTTCTTATCATCGA | |
| | | CTCTGGACCACCAGGTTCCGGT | |
| | | CCGTTAAAGGACCACAACAGCA | |
| | | GAGTACAC | |
| | | AGAAATGCTGGGCTGGGTGAAG | |
| | | CACAAGCTGGAATCAAGATTGC | |
| | | CAGGAGAATCTGCTGTTATGCA | |
| | | GATAACACCACCCTTTTTGCAG | |
| | | AAAGCGAAGAAGAATTAAGGAG | |
| | | CCTCTTGATGAAAGTGAAAGAG | |
| | | GAGAGTGAAAAAGTTGGCTTAA | |
| | | AGCACAACATTCAGAAAACTAA | |
| | | GATCATGGCATCTGGTCCCATC | |
| | | ACTTCATGGCAAATAGATGGGG | |
| | | AAATGGTGGAAACAGTGACAGG | |
| | | CTTTATTG | |

SEQ ID NO: 363

| | | | |
|---|---|---|---|
| 343441 | SCAFFOLD | CCCCGAGCTCTGGTCATGTAAC | G/A |
| | 220465_3232 | CAGGCGAGAAGTTAAGGAAACA | |
| | | CAAGGGAGAAAAGTGGCAATCT | |
| | | CTGAGCTCCAAAGACATTGAAG | |
| | | GAACTCAACTCCACCACCCTGA | |
| | | AGGAGACACACTGGAATAAAAG | |
| | | TGTCAAACAGGGCCTCAAAGCT | |
| | | CTAGCTCCGCGTCCAACTCTAA | |
| | | GAGCAATCGATGCTGAAACAGT | |
| | | CCCCCAAAGGCAGCACGGAAGG | |
| | | GGCAGAACTGAGAGTGGCCTTG | |
| | | AAAGGCCC | |
| | | GGAAGGTTGAAATGGGCTGTGA | |
| | | TGAAGAAAGTCAACTTCCTGGA | |
| | | GGAAGTTACTAAGAGCAGGAGT | |
| | | CAGGCTCAGGGGCCAAAGCAGA | |
| | | AATGAAGAACACTGGGATTAGC | |
| | | AGCAAGTGAAAGAAGGCTTCTA | |
| | | ACCCCAGGATGAACAGTCATTG | |
| | | CCAGATCACACAGAGTTATCTT | |
| | | TATTTTCTTAGAAGTGACAGAA | |
| | | AGAAATCTGAGGTTTAAACAGA | |
| | | TGCCTGATAGTGGTGCTCATGA | |
| | | CAGACTGA | |

SEQ ID NO: 364

| | | | |
|---|---|---|---|
| 343505 | SCAFFOLD | GAACAGAGGGCCTGTTTCCAGG | G/A |
| | 257759_2817 | GGAGGATTACTGGGGAGACGTT | |
| | | CCAAGAAGGCGGGGAAGCGAGG | |
| | | CCCTGCCACGAAGCGGTCATCT | |
| | | CAAAGCCAAAGCTGGACAGATG | |
| | | GAGTCCCCACTGGGATCTGAGG | |
| | | ACCAAGCAGGGTCCAGGCAGGA | |
| | | AGCTCGGGAACAAATGCACAGC | |
| | | TCAGAGAGGGGACGGTGATCGG | |
| | | AGGCGTGTGGAGTGACCACAGG | |
| | | GCAGCACAAGCACTCAGATGTC | |
| | | TGTCCACC | |
| | | CCATGACCGGCAGAAGACGCAG | |
| | | CTTCCACAGTGCACATCCAAGC | |
| | | CATGTGACACGAGGCTGGTGAA | |
| | | GGTCGTCTCTCCTCGGCCCCAG | |
| | | GTGGAGAGAGGAGAGAGACAGC | |
| | | ACGTGCTTGGGAAGTCCAAGAG | |
| | | ACCTGAACTTAATTCCTGGCTC | |
| | | CCACAGCATCAGGATGACCTTG | |
| | | ACCCCGTTATCAAGACCACTGC | |
| | | TCCTGAGTTCCCTCATGCGAGA | |
| | | AATGTCATTAACGCCCTCCCAT | |
| | | GGATGCAC | |

SEQ ID NO: 365

| | | | |
|---|---|---|---|
| 343516 | SCAFFOLD | GATTCTATAACAGAGAATGAGT | A/G |
| | 265171_9373 | CTCTTCACATCAGGCCCCATAA | |
| | | GCATCTGTTACCTGATGTTCTC | |
| | | CTACATTTAATCTTATGAAACT | |
| | | ATTCTTCCCAGAATGAGTAATA | |
| | | TTGTTCCCTTCAACTCCATGCC | |
| | | TTTGCAAAATTCTCTTATTTTT | |
| | | AAAGAATGCTCTTCCCTGTTTG | |
| | | ATCTGCTTAGCCAATACCTACT | |
| | | CATTTTTTAAGACCCTGTGTTA | |
| | | TGCTTTCTTTGATCACTCCCAC | |
| | | CTTCCCCA | |
| | | GCTTCCTTCCCATGAGTTGACT | |
| | | ATGTTCTTGTGTCACTATCTCT | |
| | | AACACATATCCTTATCAAATAC | |
| | | TGTAATACGATTATGTACTGAC | |
| | | ATCTTGTCTCCCCCACTGTGAC | |
| | | ACCGAGAAGGGCCTGGTGGGAC | |
| | | TCCTGGGCACAAAGCCTTTCTG | |
| | | TGCCCATGACCTTCCCTGAGTT | |
| | | CCAAGGGGGAAGATACAACCAG | |
| | | TTGTTAGTTAGAGAAAGGANNN | |
| | | NNNNNNNNNNNNNNNNNNNNNN | |
| | | NNNNNNNN | |

SEQ ID NO: 366

| | | | |
|---|---|---|---|
| 343880 | SCAFFOLD | TATCATTTTTATGTCTGAAGTT | C/T |
| | 125746_1970 | TTTGAGAATGTACATGTTTACT | |
| | | TATAATATTGGGATATAAATTA | |
| | | AACTATTCTTTTAAAGCACAAT | |
| | | TTTATTAGAATATTTTATACCT | |
| | | ATACTATATGTTCTGAAAGTAG | |
| | | ATACTCTTTCATAGGCAATTGA | |
| | | AATATATATATAAAAGAAGAGA | |
| | | AAAAGGCAGGGGTGAGGTGGTT | |
| | | TGGCGTTTTGGGCTTAGCTTGT | |
| | | TTTTCACATTCCAGTGGTTTGG | |
| | | CTGTTTA | |
| | | GGCTCTTTCTCCAGTGCATTAG | |
| | | TTCCCCTGTGCTCCCATAACAC | |
| | | ACTGACACAAACTAGGTGGTTT | |
| | | AAGAACAAAAATTTATTGTCTC | |
| | | ACAGTTCTAGATGCTAAGTTCA | |
| | | AGATCAAAGTGACAGCAGGGCA | |
| | | TGTTCCTTCTAAAGGCACTGGA | |
| | | AAAGGATGTGTTCCAGCCCTCT | |
| | | TTCCTAGCTTCTGGTAGTGCCC | |
| | | AGGATTGTAACAGCATAACTCT | |
| | | AATCTTCACAGGGTATTCTATC | |
| | | AGTGTACA | |

SEQ ID NO: 367

| | | | |
|---|---|---|---|
| 343916 | SCAFFOLD | GGGGAAAATGCTTCTATTTTCT | A/G |
| | 140297_5422 | TTTAAATCCTGAGTTTAATCCT | |
| | | GAGTCATTATTATTTATCTACG | |
| | | GGGTCCAATGGACCCTTTTATT | |
| | | AAAAAGGGTCATTTTTAGGCCA | |
| | | TTTAACAAATAAATCAGAGATA | |
| | | AGAATAAGGGGAATAGTGAAAA | |
| | | TAGCTATATTAATTTTTTAGTT | |
| | | TATTATTATTTTTTTGGCCACA | |
| | | CCATGTGGCTTGTGGAATGTTA | |
| | | GTTCCCTGACCAGGGATTGAAC | |
| | | CCAGGTCC | |
| | | TCGCAATGAAAGCACCAAGTCC | |
| | | TAACCACTTGACTGCCAGGGAG | |
| | | TTTTCTATAGTAAAAATTTTAA | |
| | | TAATAATTTAAATAGTATTTGC | |
| | | ATTGTCAAAGGTAATATTTTGA | |
| | | AAACTTGGACTTTTATTGAATA | |
| | | GTGAACTGCTATCTTCTTTCCT | |
| | | CCATATTTACAAAACATTTAAA | |
| | | ATTTTAGATTTATGAGCACCAA | |
| | | TTAGAATGACTGTTTCAGTGAC | |
| | | TATTTTGGCTTATATATTATGT | |
| | | ATTTTCTT | |

SEQ ID NO: 368

| | | | |
|---|---|---|---|
| 343971 | SCAFFOLD | AAATTTCTTCCCTATTGACCCA | C/T |
| | 165459_3623 | GCGAGTAAAGAATCTGCCTGCA | |
| | | ATGCAGGAGATACAGGCGATGC | |
| | | GGGTTTGATTCCTAAGTCAGGA | |
| | | AGATTCCCTGGCGGAAAAAATG | |
| | | GCAACCCACTCCAATATTCTGG | |
| | | CCTGGAGAATTCCATGGACAGA | |
| | | GGAGCCTGAAAGGCTACAGTCC | |
| | | AAAGAATTGCATAGAGTTGGAC | |
| | | ATGACTGAGCGACTGAGCACAC | |
| | | ACGTTTCTAGGTAATGCTGATG | |
| | | CCTCTGGA | |
| | | GGAGGAACACACTTTGAGAACC | |
| | | ACTCTGCTGGAGCATTTAATTC | |
| | | AGGAGCCAAAATCTTAGATGGA | |
| | | CAAGAGGCCAGCGGGGGAGGCT | |
| | | GGGAAGTGGCGCTGGTGGGGTC | |
| | | CATGGCCAGCCAAGAAGCATGT | |
| | | ACCCCCTGAAAAGAAAACAGCT | |
| | | GCGCCTCAGCCACAGCCTGTGG | |
| | | TTGCCATTTGGAAATGTGCTGT | |
| | | GAGCGTTATTAGATTCTCCACT | |
| | | TGGTCTGGATAAAGTCTGGGAA | |
| | | TCTCAAAA | |

SEQ ID NO: 369

| | | | |
|---|---|---|---|
| 344366 | SCAFFOLD | TAAAAACAAAAGTATGTAGTAT | C/G |
| | 5882_5428 | GTTACTGATGACAGTGTTAAAG | |
| | | ATAGAAATAAAGTGGGGATAAA | |
| | | AAGATAAAACAGAGTACAATTT | |
| | | TTCACTGTTTGCAAAGGGAAGG | |
| | | TCTTTGGGAGGTGAAACAGCTA | |
| | | GAAATAAATGAAGGAGCCAAAC | |
| | | TTGAGCAGATGTGTGGGGGAGA | |
| | | AGGGGTTGGAGGAGCTGCTACA | |
| | | TGTACAGGGGGAGCAGGTGATG | |
| | | GAGAAGCAGCATGTGTACAGGG | |
| | | GGAGGAAG | |
| | | TGCAAATGCAGAGGGAATCACA | |
| | | GTATGAAGGCATCAGCATGGCA | |
| | | GTCTGGAAGTTCTGAGGAAAAT | |
| | | CACAAAGTCCATGAGCAGCGAG | |
| | | AGTGGAAGGAGGGCCAGGAGGA | |
| | | CAGACAGCAGGAGACGTGGGTG | |
| | | AGAATGGAGCAGGCAGAGGTGA | |
| | | AACGCTCAGTTAGAAATGGCCT | |
| | | ATGGCCACTCTGAGGACTTCTG | |
| | | ATTGTGAACTGTGCTCTGACTT | |
| | | CTGTTTTCACTCTGATTGCTCT | |
| | | TCTGGAAA | |

SEQ ID NO: 370

| | | | |
|---|---|---|---|
| 344620 | SCAFFOLD | CACTGTGCTGCTGCTGCTGCTA | C/A |
| | 130805_8260 | AGTTGCTTCAGTCGTGTCCAAC | |
| | | TCTGTGTGACCCCATAGACGGC | |
| | | AGCCCACCAGGCTCCCCCGTCC | |
| | | CTGGGATTCTCCAGGCAAGAAC | |
| | | ACTGGAGTGGGTTGCCATTTCC | |
| | | TTCCCCAATGCATGAAAGTGAA | |
| | | AAGTGAAAGTGAAGTCGCTCAG | |
| | | TCGTGTCCGACTCTTGGCGACC | |
| | | CCATGGACTACAGCCTACCAGG | |
| | | CTCCTCCATCCATGGGAGTTTG | |
| | | CAGGCAAG | |
| | | GTACTGGAGTGTAGTTCCTCTT | |
| | | TGTTCGTGCTTCCTCCCTTCTC | |
| | | CCCTCCTTCCTTCTTGGGTCAT | |
| | | AGCCAAGAAGTGCCATGCCTTT | |
| | | TCCAAGTCAAGTAGTGAGAATT | |
| | | CTGTTTGTCTTGTACAAACTCA | |
| | | AGGTAAAGTGTACCCTCACTTC | |
| | | AAAGGAAGCTGGAAATTCACAC | |
| | | TCACTGGAAGATTAGGCTTTTA | |
| | | GATGTTTTGTTTGTTCTTTTTT | |
| | | TCTATTTTACTTTTCCTCCCTT | |
| | | TTACAACA | |

SEQ ID NO: 371

| | | | |
|---|---|---|---|
| 344645 | SCAFFOLD | AACATGAAGATGGACATGGTTT | G/A |
| | 146059_2695 | CTTTGACAGGGCCTTGCAATTT | |
| | | GGTGGCATGCGTTCAGGGAGTG | |
| | | CCAACTCATTTGAATATCTGCC | |
| | | TAATTAGGAAGGTAAATTAGCT | |
| | | GCTCCTGCTGCCAGCAATCACA | |
| | | CCACGCACTGCAAAGCCAAGTA | |
| | | TACGTGCCTCTGGTAACACACA | |
| | | CGGTCATGAATTCTTCACCTCC | |
| | | CATGCCTATCCCTCCAGCAGCG | |
| | | CGGTGGACAATGCAGAAATGAC | |
| | | CAAACTGC | |
| | | TTCTCTGTCCGTCCTTTCCTCT | |
| | | CTCACCGAGGTTTGGCTCTATC | |
| | | ACGTGGACTGGAGTACAGATGG | |
| | | TTTAGAATTCTGAGGGCTTGAG | |
| | | GGGTGAGGTGACACAAAGGGAA | |
| | | TAAAGGACTTTGTTAACCCCGT | |
| | | CGACTTAAAAGAACGCACAACC | |
| | | TGAGAGTTGTGAGTTACGTTTT | |
| | | ATTTGGGGCAAAATGAGGACTG | |
| | | CAGCCCGGGAGGCAGCACCTCA | |
| | | GATAGCTCTGAGAAACTGCTCC | |
| | | AAAGAGGC | |

SEQ ID NO: 372

| | | | |
|---|---|---|---|
| 344880 | SCAFFOLD | CCCTAAAAGGTAGATTTTGACC | T/C |
| | 240874_16363 | AGTATATTTATAATGAATGTTC | |
| | | TAGGGAATGGGGGCTTTTGTTA | |
| | | AGAAACCAAAAAGAAAACCCAT | |
| | | TTTCCCATTGCATCCCTTGTTA | |
| | | TCCTAGTGGAAAGGGAAAGAAA | |
| | | GAGAACCCTTTTTACCCTTCCT | |
| | | TTTTACAGCTGGTAACTGAGGC | |
| | | ATAAAGTGATAAGTTACCCTCT | |
| | | GGGTGGATCTGGGACTTGAACC | |
| | | TGGCTCTTTGTTTCACTAAAGG | |
| | | GCAGAGGT | |
| | | CTTTGAGGGTGGAGCAATCACA | |
| | | TGTGATTCCTGATCCATCCTTC | |
| | | TGGGAGGGACATAGCAGAATAC | |
| | | TGCACTGTTAAAGGTGCTCAGC | |
| | | AACATCTCTATCAATCCAGTGT | |
| | | GCATCAGAATCCTTAGAGCACA | |
| | | CAAAGGGGGAACAAAAGGGGCA | |
| | | ATCTTCAGAAATATTCATTAGA | |
| | | CTTTCATGTTTAGAAAGTGCAT | |
| | | GTTTGTATGATAAACTGCTTAG | |
| | | CGAAAGTCCTAATAAAATCTTG | |
| | | ACTAATGA | |

SEQ ID NO: 373

| | | | |
|---|---|---|---|
| 344894 | SCAFFOLD | TCAACAAAGTAATGTCTCTGCT | G/C |
| | 245260_13971 | TTTTAATAAAATAGCAGTTAGT | |
| | | TTCTGCTTCCAACTATACCCCC | |
| | | TCTGAATACTTAATAACACGGT | |
| | | GTAGCCCAGCAAGTGCCACAGA | |
| | | AGACTGGAGTTTGTGTCACTGT | |
| | | AACACTATGCAGTGTGGACCCT | |
| | | TGAAGAAGAATGGGACTGCCCA | |
| | | CATTGTCTGCACCCTATCTTTA | |
| | | GTGCAGATGGGATCATCATAGG | |
| | | CAAGTTGCTGTCCTTCATGGAA | |
| | | AACACCAGC | |
| | | AGGGAAGTCTGCGATACTTTCA | |
| | | GAGCCTCCATCTCAGGGCCTCG | |
| | | GATAGTAGCATCAGATGTTTGT | |
| | | AGCAGGAAGTCAAATTTAATCG | |
| | | GTTTCTCTGTGACAGATTTAAA | |
| | | GTCCATCAGGTCCTGGGGAAAG | |
| | | ATCATCTGAAGAGCCAGAAGAT | |
| | | GAGCTCATTTGCCTCTCCTCAA | |
| | | AGACAAGTTAGTGAAAAAATTC | |
| | | AACAGAGGAGTGTTTAGCAGGT | |
| | | GGAAGCTCATAAATCTGTCAGC | |
| | | AAACTTTA | |

SEQ ID NO: 374

| | | | |
|---|---|---|---|
| 345109 | SCAFFOLD | TAGTCAGGAGACTGAAGCTATA | A/G |
| | 381707_559 | TGAGGGGTACTCCCTTCCCCAA | |
| | | GGCTGAGATTTAGAACATATTG | |
| | | GAGAGACTATGGTTTGGCTGCT | |
| | | GGTGGCAGAGAAGTTTACTGGA | |
| | | TGCCTTGGGCTGCAGTTGGTGT | |
| | | CCATTGGGATGCTGAGAAAGTT | |
| | | TGCTGAAGAGCAGGTGATAGTG | |
| | | GGCTTTCTGCATGCTCCTGGAA | |
| | | GCTTTGCCATCAATTGAAGACA | |
| | | ATACAAACTGGGAAGAAGAGAA | |
| | | GCCCCTTT | |
| | | TTTGTTACCTTGCCGTGTCTCT | |
| | | CTAAGTCATGTCTGACTCTTTG | |
| | | TGACCCCATGGACTGTAGTCTG | |
| | | CCAGGCTCCTCTGTCCATGGGA | |
| | | TTGCTCAGGCAAGAATACTGGA | |
| | | GTGGGTTGCCATTTCCTTCTCT | |
| | | AGCGGATCTTTCCAACTCAGGG | |
| | | ATTGAACCTGAGTCTCCTGCAT | |
| | | TGCAGGCAGATTCTTTACTGTC | |
| | | TGAGCCAACGGGAAGCCCAGTG | |
| | | TCGCTCTAGAGCCCTTTACTGA | |
| | | TGAAGCCT | |

SEQ ID NO: 375

| | | | |
|---|---|---|---|
| 345160 | SCAFFOLD | TTGGGCTTGATCAGAAGAGAGA | A/C |
| | 60025_24520 | GGGAGCAAGAAGTAAAACTCCT | |
| | | AAGAAGCTCTTGCATTTGGATA | |
| | | GAAATTCATCTCACCTGATGCA | |
| | | CATACACCAGCCTTGTGACTAG | |
| | | GCCAGGGAAGCTTGAGGAGGTG | |
| | | AGTGCCCAAAGGAGGGTGGTGG | |
| | | CAACAAAAACAAACCAGAGGAA | |
| | | GATGGCTTGAGTGCAGCTTGAC | |
| | | TTGGTGATTAGTTGCGGAAAAT | |
| | | AGAAAAGTCAGGTTGTGTGTGG | |
| | | GTGTCTGA | |
| | | AAAGGCACATGAGCATTCTGAG | |
| | | GACAGAACTTTTAAAAATAGCT | |
| | | CCCATCCCCTTTATACTATAGA | |
| | | ATAAATAGAACAAAGCATTTTG | |
| | | AACTGTTTTACAACGATTTCCC | |
| | | CATGGGTAGATAAGCCAGTTCA | |
| | | TAAAGATCTATATAAATGAACA | |
| | | CACGTATTTTTTATTTGTCACA | |
| | | TGCTCTATTTGTTTCATTTTTT | |
| | | TCCCAAAGCCATCTGTGCCTGT | |
| | | CCTTGACTTTGTTCTCTTTTGA | |
| | | CTAGTCTT | |

SEQ ID NO: 376

| | | | |
|---|---|---|---|
| 345210 | SCAFFOLD | GCGCTCTCCAGTGGCAGCCAGG | C/T |
| | 76733_4424 | GCCACCGCAGTTTGCATCCAGG | |
| | | GGCTGGCCTGTGCCAAGCACCC | |
| | | ACCGGAAGCCACCAGCCGGCTG | |
| | | AGGGCCCCTCAAGGGACTCAGG | |
| | | TTGCACATTTGCTATTTTGATC | |
| | | CAACAATGCAGGCCCCTTCCGG | |
| | | TTTCAGGAGCCGGTCTCCTGGC | |
| | | ACTCATCAAGCGCCCAGCTTCG | |
| | | AGAGGCTTCTGAGAGCCAGGGA | |
| | | GCAAGCTTCCAGCCTGAAGGGA | |
| | | GGGTGATG | |
| | | GCTCCTGGTTTTAAATCCCCAA | |
| | | CTGAATGCCAACCATATCTGGT | |
| | | TGTCAGCAGAGAGGGGAAGATC | |
| | | AAGAGGCAGTGATGGGAGAGAA | |
| | | TGGAGAGGTGGTAACAAGAGCT | |
| | | AAAATTTATTGCCCTGAAGCTT | |
| | | GTGTTCTCCTGGGAGGAGAGGG | |
| | | CACTGCCCACTGGGCCGAGGGC | |
| | | TCTTCTGTACCCGGCACTGCCT | |
| | | TTGCCATGGGGTGGTGGGGGTG | |
| | | GTTGGGGGGGGTGGTGTTCCTT | |
| | | GAGTGGAG | |

SEQ ID NO: 377

| | | | |
|---|---|---|---|
| 345395 | SCAFFOLD | ACAATCAGAAATTTATTATCTT | A/C |
| | 125013_22246 | ACAGCAAAGTAATGATAATTCT | |
| | | GTTCTTTACAACATGCGATACT | |
| | | ATAAAATCTTTATCTTGGAATG | |
| | | TATTCTTTGAAATTAAATGCAT | |
| | | CAGAGCAATAATATAGTCTCCA | |
| | | TGATGTTAGGATCATCCTTAGC | |
| | | AAAATTCTAATGGGAAATGTAA | |
| | | ATACCAGATATTTCTGTTTCCC | |
| | | AGTCATCTCTAAGACTGTATAA | |
| | | CACAAGAAACTGGCTTATTTGA | |
| | | CATGGCTG | |
| | | TTAGACAGTCGTCTTAGGAAAT | |
| | | ACTTATTCATGGGGTGTTCTAC | |
| | | CTGTTTTCCTTAAACAAAACTA | |
| | | AATGTTGTAGCAGGCCCACCCC | |
| | | TCACATTACGATGGGTAGAGGC | |
| | | GAGTAAAAACGGAAGCTGTATG | |
| | | TTTAAGTATTTAAAAGCTAACA | |
| | | GAGTTTTAAATAAAGTATGTTG | |
| | | GCTTTTCCTACCTTGACAAATA | |
| | | CAACTTCATGACAGTTTGGAAT | |
| | | ACTGTACCTGAATGTGGGAGCA | |
| | | TAGGAAGC | |

SEQ ID NO: 378

| | | | |
|---|---|---|---|
| 345464 | SCAFFOLD | AGTTAAGTTTTCAGTCTTATGA | C/T |
| | 150213_25683 | AAGCAGCCTCAATGAGTGTTTC | |
| | | TGCCTGGCAGTCTCAGTTGCCA | |
| | | CACTGCTTTGCCAAATTATAGT | |
| | | TTATCTGCACTGTGTTTTCTGG | |
| | | TCACGGGCTTCAGCTGAGCAGG | |
| | | ACGAGACTCTGAGGACTGAGAC | |
| | | CCACATATTCAGACCATGGGTG | |
| | | CTCCCTGGGCTGCTGCCGACCC | |
| | | ACTGGGTCTGGAAGCACAGGGG | |
| | | TCACAGTGGGACTAGGCTAGTT | |
| | | CTTTTCCA | |
| | | GGTGGTTGCTATTTCCAGCTCA | |
| | | TGTTTATGAAATACATATAATT | |
| | | TTAAGGCTTTGCCAAGAGAGAG | |
| | | CCTTCCCTCTGTGGTTGATTTT | |
| | | CAGAGTCATAATTACCCTCTTA | |
| | | TTACAAGTCAGTGTTCTGGGCC | |
| | | CTGACTCCCCTGGGTTCTTGTG | |
| | | GCCGGCTCGTGGGACAGACAGA | |
| | | GGTATAACACTGGTCAAATCTG | |
| | | CTGACCACGCTGTTCCGAGCTA | |
| | | GCAGACTCGGCAGCCTTGTCAA | |
| | | GGGTTTGA | |

SEQ ID NO: 379

| | | | |
|---|---|---|---|
| 345554 | SCAFFOLD | ATGGGATTTTCCAGGCAAGAGT | T/C |
| | 175391_5819 | ACTGAAGTGGGTTTCTACCAAT | |
| | | GAACTATTCCACCCACCAAAAA | |
| | | TAAAAGACTTTCCATTGGGTCT | |
| | | CTAGAGGTAGGGCCCATTGCTG | |
| | | CATGGTTCATTGCTGTATTCCC | |
| | | ACCACAGTGCCTGGCATAACTA | |
| | | AGACATAATATAAGCATGTAAT | |
| | | GAAATAATATGGAGTTGATGCT | |
| | | GCTAATCATGGAAGGTGCTACA | |
| | | AAATGAGGCCTGTGTCCTCGAT | |
| | | TACAATGG | |
| | | TCCTCTTCCCTGAGATCCTCCA | |
| | | CTTCTCCCATCCCTTTCTGCAT | |
| | | CCCATTGTGGACCATAAGGAGG | |
| | | CATGACTAAGGCTCCACGTCTG | |
| | | TCACCATGGCTGCAGGCCCACT | |
| | | TGAAATGCTGAGGGCACTCTGC | |
| | | CTTCACCAAGGCTATCCAGAAC | |
| | | AGCACACAAACCCTACAGTTAA | |
| | | GAGGTCCAGGGACTTCCCTGGT | |
| | | GGTCCAGTGGCTAAGACTCCCT | |
| | | GCTCCCATTGCAGGGGTTCTTG | |
| | | CTTCGATT | |

SEQ ID NO: 380

| | | | |
|---|---|---|---|
| 345655 | SCAFFOLD | GAACGTGGGATGGGGGTTGCCT | T/G |
| | 213107_5745 | CCACTAACTTGTGATGCCAGCT | |
| | | TGAATGTGATTCCTAAGTTCTT | |
| | | GGAACATCTTGGTTTCCTCATC | |
| | | TGAAAAATACAGGCAGGGTTGT | |
| | | AGTAGTGAGGAACGAACCTGCC | |
| | | ACACAGTGCTAAGTAAATCCGA | |
| | | ATCTCATGTTAAAAAATAGAGT | |
| | | AGTTACTGGAACATATTTGTCT | |
| | | ACATAAAGGTCCTCTGCATGCA | |
| | | ACGTAAATCTCCTTAAGACTTA | |
| | | TTGCTGCT | |
| | | CTTCTACAGTTCCTGGCACATA | |
| | | ACTGCGACGCTGGTGAGAGAGA | |
| | | CAACAGCTACATCTTGTGCGAT | |
| | | GCCATTCAGATGACATTCCAGA | |
| | | GAAGGTAAAATTACAGGGATAG | |
| | | AAAACAACACATCAGTGTTTTT | |
| | | TGTTTTTTTTTTTAAGATGACT | |
| | | GGGAATTTGGTTTATGCCAAGT | |
| | | TACCTGAGATTACTATTTTTAA | |
| | | AAGATATTTATTTATTTTTGGC | |
| | | CACACTGTGTAGTATGTGGGAT | |
| | | TTTAGTTC | |

SEQ ID NO: 381

| | | | |
|---|---|---|---|
| 345838 | SCAFFOLD | GCCCAACATCCGCTGATGGAAG | A/G |
| | 271271_15396 | CCAAGCCGTGAGACCCATTATC | |
| | | TCCTCATCTTTGTCCACTAGCC | |
| | | TTCCAGAGTGACCTCTGCATCG | |
| | | CTCACTTCAGTCTCTGGGTTCT | |
| | | TTCACTTCCTCCCTGGGGATTG | |
| | | TTCTGCAGTCACTTACAGAGGT | |
| | | GCTCTCGAGACCTTGCTGTCCT | |
| | | TCAGGTCTCCACCTTAAACCAA | |
| | | GAAAGCCTATCTCCAGTCCTGG | |
| | | CAGCTTTCTTACTTTGCTCTTG | |
| | | TGAAGCTC | |
| | | TCTTTCAACCTCACAACTCCTA | |
| | | ATCCAGAACAACCTCTTATTCT | |
| | | CCTCCTTAGAGAGTTCCCCATG | |
| | | GCTTAATTTTTTTACCACTTGG | |
| | | ATCCCATTGGCTAGTGCATTCT | |
| | | CAGCTGTACATTCAAACCATAG | |
| | | TGAGGTATCATTACATACCCTG | |
| | | TAGAAGGCAGAAAAGTAAAAGG | |
| | | ACTGACAGTGCTAGGTGTTGAT | |
| | | GAGATATAAGACAAGGAGCAAC | |
| | | TAGAACTCTGGTGGGAATGTAA | |
| | | AGTGTTAC | |

SEQ ID NO: 382

| | | | |
|---|---|---|---|
| 345839 | SCAFFOLD | AGATCAGGAATGAGGCACTCTG | A/G |
| | 271317_5508 | TGCTCTGGAAAAATCTGGCAGA | |
| | | ATGGACCTTCAGAGAATTAGAT | |
| | | ATTTTCTGGAGAGGATTTTATG | |
| | | AACCCAATTGCTCGCATCTTCT | |
| | | CATATCTACAAAAGTACTAAAA | |
| | | ATCATTAATGGGGACAGCTCTC | |
| | | CCTCGTGACTAGGAGTGACCTT | |
| | | CTTGTGACTAGGAGAAAACCTC | |
| | | TACCAAAATGTGTGCTTGACTG | |
| | | CCCATATCCCCCTTCACCAAAA | |
| | | TCACGTCT | |
| | | TACTGACCTTCCCTCCAGAGCA | |
| | | GTTCCGCAGAGCTCTCTGAGAG | |
| | | GCTGTCTCCTGGGCTAGAGCCC | |
| | | ATGTTTTGCTCCAAATAAAATT | |
| | | TAACTCACAACCCCCACATTGT | |
| | | GTTTTTTTTTCTCAGTTGACAC | |
| | | TGTCGAGGTTGCAAAGTGAAGT | |
| | | CATGTCTCCCCTGGCTTCCTCC | |
| | | AGCCCAATCATGTTTTGTTTAC | |
| | | CTCACTCATCTGGGAAAAAAAA | |
| | | AAAAAATCAATTTTCCCAACTA | |
| | | GCAATCCA | |

SEQ ID NO: 383

| | | | |
|---|---|---|---|
| 345945 | SCAFFOLD | TAGGTTTGAGCCTTAAACTAAA | T/C |
| | 313403_3761 | CTAAACACTAGCAAAGACTGTG | |
| | | CCACATGGACAAGCACCACTGA | |
| | | AAGCAGATGCCAGTACTAAAGC | |
| | | GAAGAGCCCAGAGGAAGACCCA | |
| | | TCAGGTTCCAGGATTTTCTGCA | |
| | | CCCAGAATGTAGCAAGGCCTGG | |
| | | CTTGGATTCCATGAGATTCATA | |
| | | TAGCATATTTTACTCTTCTAGC | |
| | | TTCTTATTCTAGACTCAATTTT | |
| | | GTGTTCTCATGGTTGGGGTTCT | |
| | | GTTTTCTT | |
| | | CCCTTCTAGACAGCTCACCTGA | |
| | | AGATCTTATTTTCTGCAAAGAT | |
| | | GTGAATCTTTTCTGTGAACTGT | |
| | | TTAAGAGGCAAGCTTTTAGGAA | |
| | | TACAGGATCATTTAAGGAAAAT | |
| | | CTGGTTTTACAAATTTAAATTT | |
| | | ATTCAGGGCGAAAAACAAGCCA | |
| | | TTTCACAAGTCTGCGATTGATA | |
| | | AAATTATGAGAAAAATCTTAAG | |
| | | GAAGAAACACAGGCCTGAGGGA | |
| | | TTTGGATAATAATAACCTGCAG | |
| | | CTGCTTTT | |

SEQ ID NO: 384

| | | | |
|---|---|---|---|
| 346062 | SCAFFOLD | AGAGTCACTAATAAGGATCATT | A/G |
| | 56166_5495 | AAGAATTTATTGTAATATAGTA | |
| | | CCCCTTGTATGGAAAGCTAAGA | |
| | | GCACCAATTTAGGCGAAATAGT | |
| | | AAGATTTGGAAGTTAGAAGGGA | |
| | | CTTTAGATAGTCATTTCTCATA | |
| | | TTGGTATTTAGGGTTTAATTTT | |
| | | TCAGAGAGGTTTTGGGTACCGT | |
| | | ATTTCATTTACACCTTAGTGAT | |
| | | CCACTCCACGGTGGCATGTGTT | |
| | | TCTTATATTATCCCCATGCTTC | |
| | | TAGCAGAT | |
| | | TTTATAACCTGTCAGGACCCTC | |
| | | TTTCCTGCTAAAATTGTTGTTG | |
| | | TTCAGTCGGTCAGTCATGTCTG | |
| | | ACTCTCTTGTGACCCCATGGAC | |
| | | TGCAGCACGCCAGGCTTCCTTG | |
| | | TCCTTCATTATCTCAGGAAGCC | |
| | | TGCTCAAACTCGTGTCCATTGA | |
| | | GTCAGTGGTGCCATCCAACCAT | |
| | | CTATCTCACCCTCTGTCACCTT | |
| | | CTCCTCCTCCAGCCCTCTGTCT | |
| | | TTCCCAGCATCAGCGTCTTTTC | |
| | | CAGTATGT | |

SEQ ID NO: 385

| | | | |
|---|---|---|---|
| 346220 | SCAFFOLD | ATGTTGGATGGGCCCTTGTGGT | G/T |
| | 100297_8761 | TCTTATTACTATTATAGAATGC | |
| | | ATCTGAGCAGCAACCATCCGGG | |
| | | GGCTTTGAAACAATAAGGATTA | |
| | | TTAGTCTCATGTCCTGTGGCCT | |
| | | AACAGGACAATGGCCAGTGGGG | |
| | | AGGAAGGAGAGGGAGCACAGAC | |
| | | CTGGAGTTCTGCCTTTATTAGA | |
| | | GTCCAAGGGTGCTGTGGTAGGC | |
| | | AGGAACCAGGAGGCAGGAAGAG | |
| | | AAATGTAGTTATCTAGATTCCC | |
| | | TAAGGCTT | |
| | | CTAGAAAGGAGAACTTCGTGGC | |
| | | AGAGGGCGCAGAGAGGGCTGGT | |
| | | CTAAGAGCTTCCCTAGAAGCTG | |
| | | TGATGTATTTATGCAAGATGGG | |
| | | TGTTTGAAATGGATACTTTGGC | |
| | | AATCAGAAGTTTAACGCCAGGC | |
| | | CCTTAGGATCAGGCATTTTCCA | |
| | | TCATGCCTCAGCATTTAATATT | |
| | | CCCACCAAAGTGCAAAAGGCCT | |
| | | CCTTTCTCCACGTCCTCATCAA | |
| | | CACTTGTCAGTTTTCGTAGAGT | |
| | | GTGAGGTG | |

SEQ ID NO: 386

| | | | |
|---|---|---|---|
| 346305 | SCAFFOLD | GAGCCTGGTGGGTTACAGTCCA | C/A |
| | 131537_8388 | TGGGGTCACAAAAGAGTCGGAC | |
| | | ACGACTGAGCAACTTAACAACA | |
| | | ACTTAGCTCCACTGACTTTTTT | |
| | | CCTCTGGGAGTGAAACTAAGGG | |
| | | AAGGGTGGGGTGGGGGAAATTA | |
| | | TGCATGAAAACCTCTCAGTCTG | |
| | | AAGACTTATTACCTAAATATAA | |
| | | ATCTCACTACATGAAAGGAGAG | |
| | | TGATTGTTCTGAGGCATCAAAA | |
| | | ACTGTCATTTTTGTTTAGTGAG | |
| | | AGATAGTG | |
| | | GTCGTCGCGGTTAGGAAAGTAG | |
| | | ACTATTCTGCCAGGCTGCCAGG | |
| | | TTCAAACCCCTTCTCTGCCACT | |
| | | CACTATGCTTGTGATTTGGGGC | |
| | | AAGTTCTAAAGTTTCTGTGCCT | |
| | | CAGTTATCTAGTCTGAAAATGG | |
| | | GTGTGATAATTGGGTTGTTCCA | |
| | | AAGGTGAAATGCATTTAACAAG | |
| | | TTTAAATTGTTTAGAACAGTGT | |
| | | CTCACTGATAGTAAGTGCCCAG | |
| | | TATATATTAGCGACTATTAGCC | |
| | | AACTTCTA | |

SEQ ID NO: 387

| | | | |
|---|---|---|---|
| 346312 | SCAFFOLD | TGACATTCTTTCAATTTTTCTA | G/A |
| | 136071_11139 | TATTTTTGAAAATTTTAAAAGT | |
| | | TAAATGTTGAAGGCCAGGGGAA | |
| | | GAGTGAATCTGAACAACAGATT | |
| | | GTTTACAGCAAATATCTGAATT | |
| | | TTCACTAATGGTCTATGCCTAC | |
| | | ATTGACTTTGATAAAATGATTT | |
| | | CAAATCATTTTATTTTGATAGT | |
| | | GATTTTCAAAACTTGCATGTGT | |
| | | GCAAAGATTGTGTGCACACTTT | |
| | | CCAGGAAGGAGACGCTCCCACA | |
| | | GGTAAAGA | |
| | | TGGAGGTAGTGAGTAATACTTA | |
| | | GATATTGTTGGTAGCCAGTGTG | |
| | | TTGGATACCTGAGATTTGGAGG | |
| | | ATATGGCCATGGGTGTTATTTT | |
| | | AACTTTTAACCCAATAACAATG | |
| | | TGCTTCACTTTTGCTTCAGCCA | |
| | | CAGTGGTGGCAACAACAGCCTA | |
| | | GAAGAGTAATCCAAGTCTTTGG | |
| | | GTTGTCATCTTCAATAAAGGTA | |
| | | TTCTTATTCCTCTATTGAGGGA | |
| | | ACTCTGCTCAATATTCTGTAAT | |
| | | AACCTAAA | |

SEQ ID NO: 388

| | | | |
|---|---|---|---|
| 346372 | SCAFFOLD | ACAAAAATACTTTTTAAAATAT | A/G |
| | 157428_2012 | CTTCAAAAATCTTAGAGATGAA | |
| | | TATGACAAGGTGTTTGCAAGAT | |
| | | TTTTATACTAAAAACTATAAAG | |
| | | CATTGCTTAAGTTTCCTAAAAG | |
| | | AAGACCCAAATAAAAGGACAGA | |
| | | TATGCCATGTCCACATGTCTAA | |
| | | AAACTTAGTATTGCTGCCATGT | |
| | | CAGACTCTCCCAGATTGATTGA | |
| | | TTGCTTGGCCGTACCCTTTAGG | |
| | | CTTAACACCCCGAGACAGCACT | |
| | | TCATCACT | |
| | | AGTCATGAGTTAGACTCCTCTA | |
| | | CCTGTTTTTTATTTTCAGTTCA | |
| | | GTTCAGTCTTTCAGTCATGTCT | |
| | | GACTCTGTGACCCCATGGACTG | |
| | | CAGCACGCCAGGCTTCCCTGTC | |
| | | CATCACCAACTCCCAGAGTTTA | |
| | | CTCAAACTCATGCCCATTGAGT | |
| | | CAGTGCTGCCATCCAACCATCT | |
| | | CATCCTCTGTCATCCCCTTCTC | |
| | | CTCCTGCCTTCAGGCTTTCCCA | |
| | | GCATCAGGGTCTTTCAAATAAA | |
| | | TCAGTTCT | |

SEQ ID NO: 389

| | | | |
|---|---|---|---|
| 346388 | SCAFFOLD | AAAATGAGAAAGATAAAACCAT | A/G |
| | 164168_2380 | TGATTCTAAAGCTTAGAATGGA | |
| | | GCCAGCTCAGGCCACTGTCAAA | |
| | | GGCCTGGTCACTGAGTGAGAGA | |
| | | GGGCAGAGAGGAAGCTGTTACA | |
| | | GTTTGGGGGCTGTGTGCAGATT | |
| | | CTCATGCATTAGGGCTGAGGTC | |
| | | CAGCAGGAAACCTGAAATTGGG | |
| | | TTCAGATTTGGACCTTTCTTTG | |
| | | TGGAGATGGCATAACTTAACAG | |
| | | CAACTCGGTTTTAGGGAATGAC | |
| | | TGAAGAGA | |
| | | GATTGAGAAAGGAGCAGAGAGG | |
| | | AATCTTGTGTGCCTTTCCTTAG | |
| | | AAGTCAGCAAATCTCTTCCTTA | |
| | | CTGGTTCATTATAGATATTCAA | |
| | | TGGCATAATGCAGGGAAAGTAC | |
| | | AGATAACAATGCTGAAAATAGA | |
| | | CCTAGCTACGATAAGTAGGAGA | |
| | | CGGCAGAAATATTTGTTGAATC | |
| | | GACTTTATCATTTTCTCAAATT | |
| | | GTCTATCCTGCTTTCTTTCCTT | |
| | | TGTCTTCACTGCAGGAAATTGA | |
| | | GTTTTGGG | |

SEQ ID NO: 390

| | | | |
|---|---|---|---|
| 346429 | SCAFFOLD | AGTTAAATAAATCTGTATCTGT | C/T |
| | 1747_489 | TTATTGAAACTCCTTAAGAGAA | |
| | | AAGGAATGATTAGCAAATTACT | |
| | | AAGAGGCGGCTTTTCTCTTTGC | |
| | | TAGATTTAACCAGGAATTTGTG | |
| | | TGTGTGTTTGTATGTGTGCACT | |
| | | GTGTTGTGCGTTTCATTAATAT | |
| | | TCCTCTTATTTTTATTATTTAT | |
| | | CCTTCTCATTCACTGTTATGCT | |
| | | GAACATAGCCAGAAAATGAGGT | |
| | | CAACTCAACATTTGCTTTTGCT | |
| | | CAAGGCTA | |
| | | ATCAGGCAAATGAATTCTTTGT | |
| | | CCAATTCAGAAGAGAAATAAAT | |
| | | CAATTACCCTTGCTGAAGGGTG | |
| | | GCTATCTTGAGTGCTTTTAGGA | |
| | | AAAACTCAGGTCATTCTAAAGA | |
| | | AATGTCTGAAATATCTGCAAGA | |
| | | GTTAAGAGCAAGATAAGCACTA | |
| | | ATTTACCATCTCCTTCATCCCC | |
| | | ATAAGGAGGTACTTAAAAGAGG | |
| | | ACAAAATGCATCACTAGGTATT | |
| | | GTCAGGGTCAAACTAAGACTTC | |
| | | AGTATTTC | |

SEQ ID NO: 391

| | | | |
|---|---|---|---|
| 346497 | SCAFFOLD | TCATTTGATTCTAACATTTGGA | A/C |
| | 196368_795 | TTATGGACATGATGTTGCTGTG | |
| | | CTGTCCACGGATTATATATCAG | |
| | | TGTCTAGGCATCTCACACTCAT | |
| | | GTCCACAATACAGCTGTGTAAC | |
| | | GAGGAGCACTCTGGACATTGGC | |
| | | ATCTGGCTCATAGCCAGGAGAG | |
| | | GCTCTGCCCACCCAGCCCCTCC | |
| | | AATGGGGGGACAGTGCCTTTTG | |
| | | CCTCTTGCATGGTGGCTGGGTG | |
| | | GTGCTCACATCATAAACCACAT | |
| | | CCTGGAGG | |
| | | CTTCCAAGTGTAACTGCTCATT | |
| | | AAAGCCTATTTCTGAGGGCCAC | |
| | | GGGGTTGGGTCACTGCAAACCA | |
| | | TCCACCAGGTATGAAGTGGAAA | |
| | | GCAATGGCCTTTCAGGAACACA | |
| | | CGTGGATCAGTGATGAAGGACT | |
| | | GGATTGGCCAAAAAGTTAGTTT | |
| | | GGGTTTTTTCGTAGCACCTCAT | |
| | | GAAAATACCCAAATGACCTTTT | |
| | | CAACCAACCCAGTAATAAGGAC | |
| | | ATTAGGAAATATTGGCCTTAAG | |
| | | AGGTGCAA | |

SEQ ID NO: 392

| | | | |
|---|---|---|---|
| 346498 | SCAFFOLD | CACAGAGGAGAGATAAGGTGTG | G/A |
| | 198487_785 | AATAAGGAAATTTTATTATACT | |
| | | GACATGTGGTGAAAATCTCACT | |
| | | TTACAAAGTATTACAGTTAATA | |
| | | AATGTGTTTGCCATGATGACAG | |
| | | ATTTCCTCCTAAGTGATAGAAA | |
| | | AAGAAACACTGAAAAGTTGAAC | |
| | | ACTTGATGATTCAGAAGTGATA | |
| | | ATCTTTGGAAAAACTGACCACC | |
| | | ACATTACATATTTTATTTAGCG | |
| | | ATGGAGTTTAGACACTTGCATT | |
| | | GCAAGACA | |
| | | TGAAGTACAGTGTCCAAAACAA | |
| | | GGCACCTAGAACTCTCATCATA | |
| | | CTCTGCAAAAGACATCATTCCT | |
| | | AATACATTTTAAGAAAGACACA | |
| | | AATGAACTAAAAAGTATCCAAT | |
| | | GAGGTGAAACCTGAAAGCTGTG | |
| | | ACAGAGAAAAACACTGTCAGAA | |
| | | TGGCTGATCTCCTGCCTGTAGG | |
| | | GCAGTAGAATTAGAAGAAGCAA | |
| | | CTTATAGGTCTTCAAATATCTA | |
| | | AAGGATCAACATGCTTATGAGA | |
| | | AATTAGTG | |

SEQ ID NO: 393

| | | | |
|---|---|---|---|
| 347168 | SCAFFOLD | ATTGTCCTCTCCAGCGATTCTG | G/A |
| | 130253_23585 | AAAATGTCAGGTCTTGTCACAG | |
| | | AAGCGTTTGGCATGTGTACTGA | |
| | | ATTCTGTAGGGAGGGGTCCGTG | |
| | | GTGAACCCTGTGCTAAGGAGTC | |
| | | TTACTGGAAATCAGTGCTGGGA | |
| | | AACATGACATCACTTTGTCGTG | |
| | | TGGAAAACGTACTTAGATGTGT | |
| | | GGCAGGTTCTTCTGAACCTGTG | |
| | | GTTGTCTATCCTGGCTGCCGAT | |
| | | TTAAAACCAGCAGAGGTTTTAA | |
| | | AATGTAGC | |
| | | AACTTAGGAGATGGCCAAAAAA | |
| | | ATTTTTTTAATTAAAAAAAAGT | |
| | | CATGGACTTGTATCCCACCTGT | |
| | | GATTAAGTGAAGCCCAATGTCT | |
| | | AGGATGGGACTTGATTTAACTG | |
| | | TAAAGTCTTCTCAGGCAGCTTT | |
| | | GATAACACTGCAAGTGTTGAGG | |
| | | ACCACTCCTCTACACTGAATTG | |
| | | TCCCCAGGCTTTTGCCTTTAGG | |
| | | ATTTTCAGGGTCTGTTTTTTGG | |
| | | TGGAACCTCAAGCAGTGACGAT | |
| | | TCCAGAAG | |

SEQ ID NO: 394

| | | | |
|---|---|---|---|
| 347176 | SCAFFOLD | TGTTATCATAAAGAACTAAGTT | A/G |
| | 133267_4665 | TATAACTACTTACTCAGACAAA | |
| | | GGATGAACCCTCATTTAGGTTT | |
| | | CAGTTGATTGCAGAGTAGGCCA | |
| | | TCAATAAAAGAAGACAAAATAA | |
| | | TTCAACAGCAGGAAAAATAAAA | |
| | | TTTTATGCCTCTAGCCTCAAAC | |
| | | TTCCTCATTAGTGGAAATTCTT | |
| | | TTAAAATACCATGAAGTATTCT | |
| | | CATTGCCTTAAAAATGTAATTT | |
| | | TTAAAGAATATTGTGAGGAAGA | |
| | | AAAATGCC | |
| | | CAATAGAGCTGAGAAAGGTTTG | |
| | | TGTATAATTGTGACTTTTTTCC | |
| | | TGGGCCTCAGGCCCATAAATGC | |
| | | CTCTCCTTCCCAGCTAGCACAG | |
| | | TGGTAAAGAACCGCCTGCCAAT | |
| | | ACAGGAGGTGCAAGTGACACGG | |
| | | GTTCGATCCCTAGGTTGGGAAG | |
| | | ATCTCCTGGAGGAGGAAACGGC | |
| | | CACCTGCTCCAGTGTTGCTGGG | |
| | | AAAATTCCATACACAGAGGAGC | |
| | | CTGGTGGGCTGCAGTCCATGGG | |
| | | GTCACAAA | |

SEQ ID NO: 395

| | | | |
|---|---|---|---|
| 347369 | SCAFFOLD | TAACCACTCAGACATAGATTGG | T/C |
| | 200949_5881 | AGGTTTCAAAGACCCCCTCATT | |
| | | GGACTTGATTAATTTTTTTAAA | |
| | | GCAGCTAACAGAACTTACAGAA | |
| | | ATATTTACTTTGAGATCACTGA | |
| | | AGTGAAGTGAAGTGAAAGTCAC | |
| | | TCAGTCACACCCAACTCTTTGC | |
| | | GACCCCATGGACTATATAGTAC | |
| | | ATGGAATTCTTTAGGCCAGAAT | |
| | | ATTGAAGTAGGTAGCCTTTCCC | |
| | | TTCTCCAAGGGATCTTCCTAAC | |
| | | ATAGGGAT | |
| | | GAACAGGGGTCTCCTGTATCGC | |
| | | AGGCAGATTCTTTACCAGGTGA | |
| | | GCCACCAGGGAAACCCTTTGGA | |
| | | GAAGACTATAAAATTATATAAT | |
| | | TTAGGAACAAATGGAAAAGGTG | |
| | | CATAGGGCAAGGTATGGTAAAA | |
| | | CCTACTCTGAGCACACCACTCT | |
| | | TCCAAATCTCCACATGTTTACC | |
| | | AACCCAGAAGCTCTCCAAGCCT | |
| | | CTCCCTTTGGGTTATTTATGGT | |
| | | GGTTTCTTATGTGTGTGTGTGT | |
| | | GTTAGTGG | |

SEQ ID NO: 396

| | | | |
|---|---|---|---|
| 347617 | SCAFFOLD | GTTCATGATTGGGAGAGTGAGT | T/C |
| | 280066_1124 | GACTTTGTGAGACAAATACTTT | |
| | | TTTCCTAAGGTAAGAATATGTT | |
| | | GTCTTATTTTCCTGTAGATGGG | |
| | | AGAAGAACTCACATTTGAAATT | |
| | | CTTAATGTACTGGAATTTTCTA | |
| | | GGTAAGCTATCTTTTTGATCTG | |
| | | TATGTGAATTTTCCAGGGCTCT | |
| | | TCTTTGACTATTCAACTGAGAT | |
| | | TTGGCTGTAAATGAAAACCTAA | |
| | | TAACAGAATCCTGAAATTCTAG | |
| | | TTAGCTTC | |
| | | ATACACCCTTGCATCTCAGTTC | |
| | | AGTTCTTGCTTCTCTAGGCCTC | |
| | | ATTATAATAATTGTTTTAATTG | |
| | | GAATACTCTTCTCTGAGGCTTG | |
| | | CTGCTGCTGCTAAGTCGCTTCA | |
| | | GTCGTGTCCAACTCTGTGCGAC | |
| | | CCCATAGACGGAAGGCCACCAG | |
| | | GCTCCCCCGTCCCTGGGATTCT | |
| | | CCAGACAAGAACACTGGAGTGG | |
| | | GTTGCCATTTCCTTCTCCAATG | |
| | | CATGAAAGTGAAAAGTGAAAGG | |
| | | GAAGTCAC | |

SEQ ID NO: 397

| | | | |
|---|---|---|---|
| 347802 | SCAFFOLD | GGTGGATTCTTTACCAGCTGAG | G/A |
| | 45275_15406 | CCACCAGGGAAGTCAGCCTATC | |
| | | CCTTCTCCAGGGGATCTTCCCA | |
| | | ACCCAGGAATCAAGCCCGGGTC | |
| | | TCCTGCATTGCAGGCAGATTCT | |
| | | TTACCAACTGAGCTCTCAGGGA | |
| | | AGCCCATAAAGGATTAAGGCAT | |
| | | ATATTAATAATACTCAGGAACT | |
| | | ATGCAAAAACCAGGAAATAATG | |
| | | CCTGTCCTCACCAGCCACTGCA | |
| | | GAAAACCTAGTAACTCACAGAG | |
| | | TGTTGAGTA | |
| | | AGTACTAGAGGGATTTTGCTAT | |
| | | AGTGGTGGGCAAAGTTAGCCTT | |
| | | AAATGCTGCTCTGGCTCCACCT | |
| | | AACAAAACTTAAATGCAAGACA | |
| | | CAACAGGATCAAATAGGTTTCA | |
| | | AGTAATGTAATTACATATAAGA | |
| | | ACAAAGCTCAAAGTAGTCACAG | |
| | | GAATAAAATGTATCTAGGACAC | |
| | | AGCAAAGTGAAATTCAAAATCA | |
| | | AAAGTGTCACACAATCAAAAAT | |
| | | TATTGAGCCTGCAAATTTGCAA | |
| | | GAAAATAC | |

SEQ ID NO: 398

| | | | |
|---|---|---|---|
| 347981 | IBISS4snp291 | GTTTGAATTCCGTTTGTGCCTA | C/T |
| | | TTCCCCAGCCCCAATCCTTACC | |
| | | GATTGGTATTTTCTCCTTTTGC | |
| | | ACATGTCCCCTGCCTGCTCTCA | |
| | | CTACCCAAAGAG | |

SEQ ID NO: 399

| | | | |
|---|---|---|---|
| 347988 | IBISS4snp414 | TTGTGGGTATTTGCCTCATTCC | T/G |
| | | ATCCCCAAGCTTTGCAGCTAGA | |
| | | CAGTGAATTCAAAACTACGTTC | |
| | | TAAGGCGTGTCCTGTAATGGAG | |
| | | TCATTGGTTGAC | |

SEQ ID NO: 400

| | | | |
|---|---|---|---|
| 348068 | SCAFFOLD | ACAGGGAATTTGAGGATACAAA | T/A |
| | 110535_883 | TACTCTTAGCTTGATCTAGATA | |
| | | CGGGTTCCAGATGGACTAGTCC | |
| | | CTCAAAATCTTCATCCTATCAG | |
| | | GAGCGGGATAGCTGGAAAAAGG | |
| | | CCAGATGAGGACCTCTAAAGCA | |
| | | CAAGGCCCAGACTAGGGTTCCC | |
| | | GCCTGGATAACTCTAAGGAGAG | |
| | | AGTAACTCTCTAGTCAGTCCTG | |
| | | GCAGGTATTTCCAGGACGCCAT | |
| | | CCCTCCCTAGTCCTCTTCAGAT | |
| | | CTTCACAC | |
| | | CTCTCTAAACTATCCTAGACAC | |
| | | TGCCCTGGCTTCACTCAAATCT | |
| | | CTCTTCCAGTCTAAACCATTTT | |
| | | ATGGGTGCCAGTTTGTCTACTA | |
| | | GATATTTTCTTGCCTATACTTC | |
| | | CCTGCAAACTTAAACAGCAAGC | |
| | | ATCGATTCCAGGATATCCCAAG | |
| | | GACTACGTTAATTAATTCAACC | |
| | | AATCAATAAATATTAATTGAGC | |
| | | GCCTTTTATGTACTAGTAGTTT | |
| | | TCAGTTAGAGTTACAGTGGTGA | |
| | | ATAAAGCA | |

SEQ ID NO: 401

| | | | |
|---|---|---|---|
| 348126 | SCAFFOLD | GTTAGAAGTAACCCAGAGGTAA | C/T |
| | 130001_85195 | TGGCTTGCACACACAGGAATGC | |
| | | CCGCCTCCTCAGGTTCTTTCTC | |
| | | CTCTGCCTTAGGAAAGAGGACC | |
| | | TGCTCAGAGAAGTCTGAGCTCA | |
| | | ACAACCTTTTCTACTTGATACA | |
| | | ATCCATCTCCTCATTCTGAGTT | |
| | | CAGCTGTTGTGATTGCATCCTT | |
| | | ATATACTCATTCATTTCCTTTG | |
| | | CTCCCAACTTTACATTCAGTCA | |
| | | GCCTCACAGAAATCCACTAAAC | |
| | | TTAATAAA | |
| | | GCTGCCTACAGGCTCTATGTTA | |
| | | TCTTTGAGTGATATGATTTGTG | |
| | | CAAATTTTTACGTAAGAGAATT | |
| | | CCCCTTTCCTTCCAATTTCTAT | |
| | | TAGGTCTGTTAATGTGTCTAAA | |
| | | ACATTTCATTAGATGACTGTTT | |
| | | CTATTTTTCCTTTTATATAAAA | |
| | | CAAATTGTCCTTGCCAGGTTAA | |
| | | GGAATCAAGGTGAATCCTTTAT | |
| | | AACTGTTAATACAAAACACAGC | |
| | | ACCAGAGGAAGGCCCCAAAAAC | |
| | | CTAGAAAGG | |

SEQ ID NO: 402

| | | | |
|---|---|---|---|
| 348185 | SCAFFOLD | ATGCATGAAAGTGAAAAGTGAA | G/C |
| | 146214_10543 | AGTGAAGTCGCTCAGTCGTGTC | |
| | | CGACTCTTAGCGACTCCATGGA | |
| | | CTGCAGCCTACCAGGCTCCTCC | |
| | | ATCCATGGGATTTTTCCAGGAA | |
| | | AGAGTATATTCTTCCTCAAAAG | |
| | | CAAGACCTAACCACAGCTGCAA | |
| | | ATGTGTTAAGAGAAGATGTGAA | |
| | | GTAGTGGTTAAAATCAGAACCT | |
| | | GGATTCAGGACATTTCATCCCA | |
| | | GCTCTACCTACCACTTTCTAAC | |
| | | TGCATGGC | |
| | | TTGAGCAAGTTTTTTAAAACCA | |
| | | CACTGCCCTTCAGTCTCTTTGC | |
| | | CTGCAACATGGAGTTAAATGAA | |
| | | GTTCTTTGGATTGTTGATTATA | |
| | | TGAGGCAAAGCACATAAAAGAC | |
| | | TACCTGATAAAGAAATGCTAAG | |
| | | TGCAGAGTCTTATTTCCATGTG | |
| | | AGAAGTCTTATTACTTCCCTAT | |
| | | TTCTGTAGATCAGACGTCAAAG | |
| | | CCACATTTACACATCCAGGAAT | |
| | | TACAATCCAGACCTGAACACAG | |
| | | TTCTTTTT | |

SEQ ID NO: 403

| | | | |
|---|---|---|---|
| 348246 | SCAFFOLD | TTTAGTCATACTCTAATAGTAT | C/T |
| | 1654_783 | GACAAAAGTACTCTAATCCATT | |
| | | GAGTAGACAGAATGCAGAGTAT | |
| | | TCAATAGTTTTGAGGAAGTGTT | |
| | | TCTATTCCACATTAGATTTCTC | |
| | | AAATTACTGAGCTTTTCATGTA | |
| | | ATCTCTTATCACAAAAAAGTTA | |
| | | CTTACTATTGTTGCATTTATAA | |
| | | TATGTGTTTAATTGAGTGGGGA | |
| | | TACAGAATAGCTTCTCCAGGTT | |
| | | TAAGATTGCCAACTCTGCAGAA | |
| | | CTAGTATC | |
| | | TGGGCACCTGTTATTAAGATGA | |
| | | CATTTAGGAGATTAAGTTTTTT | |
| | | TTATTAATTAGGTTTTTATTAA | |
| | | ATCTATCCATTTGAGTCTCTAC | |
| | | CCCTTCACCAATTAATAAGTAA | |
| | | TCTGGAGAATCCCTTTCAGAAG | |
| | | GTAAATAAAAACAGGAATAATC | |
| | | AAGAGTCTGCAGTATCTCCACA | |
| | | CTTAGGTTTCAATGAAAATCTA | |
| | | AAAGGAGTTGAATTTACATTTG | |
| | | AAATAGACATATTTTAGGGTCT | |
| | | CCTCCTAA | |

SEQ ID NO: 404

| | | | |
|---|---|---|---|
| 348275 | SCAFFOLD | TGAAAATTCTTCCCATTTTGAC | G/T |
| | 181062_3459 | ATAAATCTTGAAAATAATAATT | |
| | | TACTGTTTGTAACCAAGTCAGC | |
| | | TAAAACCTAATTGGCTCAAACT | |
| | | CTATAAGTCTTGAGGTATTTTC | |
| | | ATTGTCTTTCCTTTGTACTGCC | |
| | | TTAACTCAGATTTAATATACAG | |
| | | GTGAAGATATTTCACCTGTGTT | |
| | | TGCCAATCTATTCCAAGATGCC | |
| | | AATTATAACATAAAAAACACAA | |
| | | TGAGTCTCTATGCATGAAGTAG | |
| | | ATAAGGTT | |
| | | ATAATGTGCCAGGCATTTCATC | |
| | | ATTTATGGGTTATAGATGGAGA | |
| | | TTTTCATTAAGCATTATTGAAA | |
| | | TTACCATAACATACATGAGTAC | |
| | | ATATTCCAAAAAAGAATTTCTA | |
| | | TTAGCAATGTAGAGAAATGGTA | |
| | | CCTGTTGATAAAACAAACATAG | |
| | | TATTTGTTCACTTGGTGCTTTC | |
| | | AATTACTTAAACAAACTCAAAA | |
| | | AGAGGAGGAAAAAAATGAAAAG | |
| | | TATTTTAATTGGAAACATCAAA | |
| | | CAATTTGA | |

SEQ ID NO: 405

| | | | |
|---|---|---|---|
| 348325 | SCAFFOLD | CATTAAACAAAAGTGTAATGTG | G/A |
| | 200299_9268 | TTGAGTAACATTCTCGTACATA | |
| | | TCATCACCTAATGTTGATTTTT | |
| | | GATGAAATTTAGGGATTGCTCA | |
| | | TGGATTTGAACAGAAAGGGAAC | |
| | | CCTTTGGAACTGACTGGCAGAG | |
| | | CTAGTATGAGAATTGATCAACA | |
| | | GGAGGTTCTGACCCAAGATACT | |
| | | ATAGAAAGGGTTGGAGAGAATT | |
| | | GTATAAATAATTTTCTGGTTTA | |
| | | AATCTATCACAGTGCTATCACT | |
| | | GCTTTCCT | |
| | | GTAGCAAATGAGTTTGATTTGA | |
| | | TTCAGTCAAAATTTCTGGTATA | |
| | | ATACAAATGAACATTTATAAAC | |
| | | CAAATGCAAAAAAGCCTCAGTA | |
| | | ATAGGAATGAGAATTAGTTTGA | |
| | | GCAGTAGAGAAGTATTCTCAGT | |
| | | GCTGAGAGGCTATGATTTCGTG | |
| | | AAATTAAAGATCTGATTTTAGT | |
| | | GCATGCAAAATAGGCAGTTTAA | |
| | | ATATAGGTCACCTTTTCTACCC | |
| | | AGATAAATTACTTCTGGTAAAC | |
| | | ATAAGTAT | |

SEQ ID NO: 406

| | | | |
|---|---|---|---|
| 348415 | SCAFFOLD | TTCTGATACTTAATGGCCCCTT | G/A |
| | 230074_9581 | GGTCCCTATCATCACCAATTAG | |
| | | ACTACAAGAAGAGTCAAGTGTG | |
| | | GAAAGTCTCTTAACATATAAAA | |
| | | TGCTATTTCCCTGATTTCTTAG | |
| | | GCTTATTTGGCATAAACTGAAA | |
| | | TTTTGCCCATCACAGAAATAAA | |
| | | AATGTCTAGAAAGGTCCACACA | |
| | | CATAGATCTTTTAGTGTCTAAA | |
| | | ATAATTGCATCCTTTTGTTGTG | |
| | | TTTCCTGGAACAGCTAAGCTTT | |
| | | ACACTTAC | |
| | | ATCTTTGGTTTCTTTGAGCTCT | |
| | | TGGACCTTTAGAAGTGAACATG | |
| | | CTTGGGCAGGAATAATCAACAA | |
| | | GCCATGTCAGAGAAGAAAAGAG | |
| | | CAGGACAAGATGAGAAGGCCTT | |
| | | TTCTTTATATGCTTACATCCCA | |
| | | ACCATTGTCCTCTGTGATCTTT | |
| | | CATCTGTGTTTTCAACCATGGG | |
| | | GCGACTGCTGATAAATTCTAAC | |
| | | AGAGTCCTCTACTTGGATAACC | |
| | | AGCTCCAGAGAAAATCCAGGTT | |
| | | GTTTAAAAT | |

SEQ ID NO: 407

| | | | |
|---|---|---|---|
| 348459 | SCAFFOLD | ATACATGAGCTATTTCAGAGGT | A/G |
| | 245593_3874 | GGAAATGGCAATGTTTGATGAC | |
| | | TGAGCATGGCAGCAGTGGGAAC | |
| | | TAAAGGGTCCAAGGAGGACAAC | |
| | | CAAATTAGGTGTAAAGATCATT | |
| | | ACTAATGATCCCTCAGACCTCT | |
| | | CTGATAACTTGGAAAGGGGTCA | |
| | | GCTCCCATACACTTGATCATTT | |
| | | TTACTATTCAGTTTATCTCTGT | |
| | | TTCAATAGGGATTTACTCATAC | |
| | | TCTATACATAGCTGCCAAACTA | |
| | | TTCACTTC | |
| | | GGGATGACTCTTTTTGTCTAAC | |
| | | ACCATAGAATCATCAGAAGAAG | |
| | | ACATAAAAGTGATCCTTATTTG | |
| | | TAGGTTTAGAAAAAAGATTTGC | |
| | | TGATATATTTCTATCTGTTTTG | |
| | | ATTAAATACTCCAAAACTGTTT | |
| | | ACATACACATTTTAAAAGGTGA | |
| | | TTTTGTATCTCCTTTTCTATAT | |
| | | GTCAAATAAATATTTGGTTTCA | |
| | | GAGATAAGTTTTAGTTATAATT | |
| | | TACTTGCATGTTTTCTATGAAC | |
| | | ACTGAAA | |

SEQ ID NO: 408

| | | | |
|---|---|---|---|
| 348572 | SCAFFOLD | TGAAGCTCCTTTCAGCAGGACT | C/T |
| | 285028_33789 | TCAACCTAATAGCAAATAATCA | |
| | | CATCCCTTCTGGTGATGTTTAT | |
| | | GAACTAGAGAATGGTTCCAATT | |
| | | GGTCAGTTTCATGCAGGTCTGA | |
| | | ATATACACATTTTGATTGAATT | |
| | | TGCTCAAAAGAAGATAGCTGCA | |
| | | CTGTTAATCATATTTATTAGTT | |
| | | GATCTTAAGAATTCATGCATTT | |
| | | AATTGTTCTAGAATTAGAGATA | |
| | | AACCTTGGAATTATGACTGTGA | |
| | | GAAATGGC | |
| | | AAGAGTTTCATTGGGGATGACA | |
| | | GAAGGCAATGCTGAGCAAGAAG | |
| | | GAGGTTTGAAATCCTGCATTAA | |
| | | TTCTAGAGTTCATCAACCTATG | |
| | | ACTATGGAAATCTCGATATATT | |
| | | TGAATTGCAAAAATTTATAAAA | |
| | | AACTCTTAAATACTTTTTGTCC | |
| | | TTCTGTTTTCTCCTTCAATATA | |
| | | AGCCTACAAAATTATAAGGTAC | |
| | | TTAAGTGTTGGGACCATGTCTC | |
| | | TGAATCTTTAATAACAAACACA | |
| | | CTCTCATA | |

SEQ ID NO: 409

| | | | |
|---|---|---|---|
| 348929 | SCAFFOLD | ATAGATGGGACCCCAAAACAGA | C/T |
| | 10954_11613 | ACAGACATAGTTTGGAGGGTGG | |
| | | AGGGGAACAGCGAAATCCAGAT | |
| | | AAAGCCTGGAGCTGAATTTAAA | |
| | | GCAAGGCGCCTGTGTTCATTTC | |
| | | TTCATTTTGGCAAGATGGCAAC | |
| | | CTTAGGAAGAGCTGGCTGAGGG | |
| | | CAGGTGCAAGTTCTCCATGCTG | |
| | | TTTTTGTCACTTTTCGTTCCAT | |
| | | CTAAAATCATCCCAAAATCAAA | |
| | | TGTTAGAATTTGTGATGGTATG | |
| | | GGGAAATA | |
| | | AGTAAGTCCCCACTTATGAGTG | |
| | | AGTTCCCTTCCAAAAGCACATT | |
| | | CATAAGTCCCATTTTTTCGTAA | |
| | | TTCCAACAAAGTTAGCCTAGTA | |
| | | CGCAACTTTTACAGATAATGCC | |
| | | AGACAGGTGAATTAGCTTATGT | |
| | | GATTGGACATGTGAACACAAGT | |
| | | TTGAATCTTTTTTGTTTGTTTG | |
| | | TTTTTTACTTATTTATTTCTGG | |
| | | CTGAGCTGGGTCTTTGTTGCTG | |
| | | CACTTGGGCTTTCCTCCAGTTG | |
| | | TGGCAAGC | |

SEQ ID NO: 410

| | | | |
|---|---|---|---|
| 348963 | SCAFFOLD | ACAGGCCCCTCCCTCCCACCTG | T/C |
| | 120012_10659 | CCCCTCCCTTCCAGCCACCCCT | |
| | | CTTAGGCTGTCACGGAGCCCCA | |
| | | GCCTGGGCTTCTCTGTGTCATG | |
| | | CGGCAAATTCTCACTGGCTGGC | |
| | | TGTTTTACAGATAGCAGTGTGT | |
| | | ATGTGTCATCGTTACTCTCTCA | |
| | | AATCGGACCAAAATTTATTCAG | |
| | | CTATTCCCCTGTTGATGAACAA | |
| | | TTAAATACTTTCTAGTTTTATA | |
| | | AACACTGTAGTACAAACATCTC | |
| | | CATATGGA | |
| | | TGATTGTGAGCATGTGTAAAGT | |
| | | ATATTGATAAGACAGATTTTTA | |
| | | GATGGTCAAAGGAGATTCTAAT | |
| | | TTGAGGTTTGAGAGACAGTTCC | |
| | | AAGTTTCCTCTCTCCTTCCTTC | |
| | | CTTCCTTCCCCTCTCATTCTTG | |
| | | CTACAGTTTTGAGAATACTGTG | |
| | | TATTATCACTTGTTTTCATGCT | |
| | | TGTCAATTTTAGTAGGTGAAAA | |
| | | ATAATTTACTGATTATTTAATC | |
| | | TGAAGATTTTAAATTGTGGTTC | |
| | | AGGTTGTA | |

SEQ ID NO: 411

| | | | |
|---|---|---|---|
| 348968 | SCAFFOLD | GAATATTTGCAACCACGTAAAA | C/A |
| | 121110_8034 | TTTTGTATAAATCAATTATATA | |
| | | ATGTGTGATTCTAATATCATTT | |
| | | TCCTTTTATCTTATTTGCTAAC | |
| | | TTCCCACTTTCCAGATATTCAG | |
| | | AGGGTAAAGCATGCTGATTAAG | |
| | | AATCTAGTCTCTGAACTCAACT | |
| | | CCCAGAGTCCAGATTCCAGCTC | |
| | | TCCTCTGAGCTCTGTGACTTAG | |
| | | GACAAATTATTTAATCTCTGTG | |
| | | CACCTCAGTTTCCTCATATGTA | |
| | | AAATGGGA | |
| | | TGATGACACCTCCATCATAGGA | |
| | | TATTGAACATTAAAACAAGTCA | |
| | | ACCCCCTTAAACATGTCAAAGA | |
| | | ATGTCGGATACACAGTAGAAGG | |
| | | CACAAAATTTTTAGCCATTGTT | |
| | | AAATATATGTGCTTATTTTCTA | |
| | | AAAAATATGTCATATTCTAGGC | |
| | | ACTTGTTACAGACAGCAAAACT | |
| | | TTGTGGAAACTGCTTGTAGTCT | |
| | | TTGTGTAAATCTAATTCATCCA | |
| | | TTTTAAAGCTCAAGTGTAATCC | |
| | | ATAGCTTG | |

SEQ ID NO: 412

| | | | |
|---|---|---|---|
| 349106 | SCAFFOLD | GAGTTGGACACAACTGAGAGAC | C/T |
| | 170646_5902 | TTCACTTTCAAGCTTTTAAAAT | |
| | | TATTTGATAGGGACTGGTGTTT | |
| | | TTAATTCTGCTTTGAGGCACCC | |
| | | TGAATATTCTCACCTATAAATT | |
| | | CCTGGAAGTAGTCAGATTAGCA | |
| | | AGGAAACATTCCTTTGTAAATC | |
| | | ACCACATTTGGTGGTACTTATC | |
| | | CTGTGGAATATTAGCCAATACA | |
| | | CTGAGTGCTATTTTTACTAGCA | |
| | | TTAAATTCATACATATTATTTC | |
| | | ACCACTGG | |
| | | GCTAGTGGTAAAGAATCTGCCT | |
| | | GATAACACAGGAGATGCAAGTG | |
| | | ATGCAGGTTCGATCTCTGTGCA | |
| | | GGAGGATCCCCTGAGGAAGGAA | |
| | | ATAGCAACCCACTCCAGTATTC | |
| | | TTGCCCAGAAAATTTCTTAAAT | |
| | | AGAGAAGCCTGGTGGGATATAG | |
| | | TCCACAGGGTTGCAAAGAGTCA | |
| | | GACACGACTGAGCACACACACA | |
| | | TATTTCACCAGAACAATGAAAA | |
| | | ATAATTATTTCTTTACTTGTAT | |
| | | TTATCCT | |

SEQ ID NO: 413

| | | | |
|---|---|---|---|
| 349116 | SCAFFOLD | TTGCTGAAAGAGGAGTTAGCTG | C/T |
| | 1747_667 | GCATATTAATATATTATTCCAG | |
| | | ACAACAGAATGTGAGTGAATAA | |
| | | ACTAGAAGATTTAAAATGAGAG | |
| | | TGCAGAGGAGACAATGCATATG | |
| | | AAAGAAACTGGAGATTTAGAAG | |
| | | CATGGAAATGGCATGACACTTT | |
| | | GAATGTGGAGGAAGAATGGAGA | |
| | | GAAGTTAAATAAATCTGTATCT | |
| | | GTTTATTGAAACTCCTTAAGAG | |
| | | AAAAGGAATGATTAGCAAATTA | |
| | | CTAAGAGG | |
| | | GGCTTTTCTCTTTGCTAGATTT | |
| | | AACCAGGAATTTGTGTGTGTGT | |
| | | TTGTATGTGTGCACTGTGTTGT | |
| | | GCGTTTCATTAATATTCCTCTT | |
| | | ATTTTTATTATTTATCCTTCTC | |
| | | ATTCACTGTTATGCTGAACATA | |
| | | GCCAGAAAATGAGGTCAACTCA | |
| | | ACATTTGCTTTTGCTCAAGGCT | |
| | | ACATCAGGCAAATGAATTCTTT | |
| | | GTCCAATTCAGAAGAGAAATAA | |
| | | ATCAATTACCCTTGCTGAAGGG | |
| | | TGGCTATC | |

SEQ ID NO: 414

| | | | |
|---|---|---|---|
| 349117 | SCAFFOLD | AAAGGAATGATTAGCAAATTAC | A/G |
| | 1747_446 | TAAGAGGCGGCTTTTCTCTTTG | |
| | | CTAGATTTAACCAGGAATTTGT | |
| | | GTGTGTGTTTGTATGTGTGCAC | |
| | | TGTGTTGTGCGTTTCATTAATA | |
| | | TTCCTCTTATTTTTATTATTTA | |
| | | TCCTTCTCATTCACTGTTATGC | |
| | | TGAACATAGCCAGAAAATGAGG | |
| | | TCAACTCAACATTTGCTTTTGC | |
| | | TCAAGGCTACATCAGGCAAATG | |
| | | AATTCTTTGTCCAATTCAGAAG | |
| | | AGAAATAA | |
| | | TCAATTACCCTTGCTGAAGGGT | |
| | | GGCTATCTTGAGTGCTTTTAGG | |
| | | AAAAACTCAGGTCATTCTAAAG | |
| | | AAATGTCTGAAATATCTGCAAG | |
| | | AGTTAAGAGCAAGATAAGCACT | |
| | | AATTTACCATCTCCTTCATCCC | |
| | | CATAAGGAGGTACTTAAAAGAG | |
| | | GACAAAATGCATCACTAGGTAT | |
| | | TGTCAGGGTCAAACTAAGACTT | |
| | | CAGTATTTCTTTGAATAAAAGT | |
| | | ACTATGCTCCACTGCCTAAGAT | |
| | | GAAGAGTG | |

SEQ ID NO: 415

| | | | |
|---|---|---|---|
| 349235 | SCAFFOLD | CTACAATCCATGGGGGTCGCGA | G/A |
| | 210732_8597 | AGAGTAGGACATGATTCAGTGA | |
| | | CTGAGCACATGCACATACAATA | |
| | | TTATATATTTATCTTTATACCA | |
| | | GTAAGTCATAAATGTAACCTGT | |
| | | AACATTTGTTGTAGCCCTGGGT | |
| | | AAGCTAAGATGAATTCTTTGAG | |
| | | GAGTCCAGTTATCTGAAGTTCA | |
| | | AGGCACACGAAGACATTGTTCT | |
| | | AACACTGTCAGGAATCACAGAT | |
| | | GTGAAGCAATTAGTTCTATCTT | |
| | | GGGAAGTA | |
| | | GAAAGGCTTTGCAGATTGTTGT | |
| | | TGCTGTTTAGGCTTTGCAGAGC | |
| | | TGATATTTACATCAGTTATTTG | |
| | | AGGATAAATATGTTTTCTACAG | |
| | | GTGAAGATAGTGGGAAGGGCAT | |
| | | TTCTGGGAGAAAAAGCAGCATA | |
| | | AACCAAGGAATAGGGTTATGGA | |
| | | AAGAGGGTGTTGGATCTTGGCA | |
| | | GTGGTCAATAACCAATAATGCC | |
| | | TTTCTCAGTATAAAATCATAAG | |
| | | GGAAAATTCTGTTACTTCTATT | |
| | | GCTAAATC | |

SEQ ID NO: 416

| | | | |
|---|---|---|---|
| 349299 | SCAFFOLD | ATTCTTCTTTGGTCATGATGCT | A/C |
| | 230591_4636 | GAGTGTGGCCTGAAGATGATGG | |
| | | AAATAGTGAAGAACGGATCTGA | |
| | | AAACTGTAACAGATCCAAGTTG | |
| | | CATGGTCAACTAAAAAGTAAGA | |
| | | AGTAGAGCTTTTCTTCAGCTAC | |
| | | CTAATGCTGTGTTATGCTGTAT | |
| | | ATGCTTTCCTAATTAATCTCTT | |
| | | ACAAGACTTGATGGTTTCCAAA | |
| | | ATCCCATCTGATAACTGCTCTG | |
| | | TCAGTGACAGACAGTATCTTTG | |
| | | GATAAGTG | |
| | | AATGGCCTATTAGCCAAATTGA | |
| | | ATGAAAGTGTGACAGTTTATTA | |
| | | ATAATGACATTTAAATGATATT | |
| | | TCCACTCAGAGAACTTTGTTGC | |
| | | CTGTATCAGGATGTAGGTTATA | |
| | | TGAACTAGCAAGTAATCTTAAA | |
| | | TTCTAAGTGGCATAAAACTACC | |
| | | CAGATTCATTTCCTGCTCCTAC | |
| | | TACATATCTCCAGAGCTGAGAT | |
| | | GGAGGGAATGAGTTTGGGCAGG | |
| | | GGGCGAGAATTTGCTCATTGTT | |
| | | GTTATTAC | |

SEQ ID NO: 417

| | | | |
|---|---|---|---|
| 349323 | SCAFFOLD | CTGAAACTTTGCCAGGCCTTGG | G/C |
| | 240108_5381 | CCCGCAAACGTCTTCCACCCTA | |
| | | CCCAGCGCTGACAGACAGCACA | |
| | | ATCCGGAGCCCATAAAGATTAG | |
| | | AAATGTTGTATTAGTCAGTGAC | |
| | | CCTTCCCAATTAAAATACTTAG | |
| | | TTCAGGGTTCTTCACACAATGC | |
| | | TTAAAGTACTCTCTGTTCAACA | |
| | | AAGGCTTGTTGACTGAATTTAC | |
| | | AGCCTGTGCTGTAACATGAACT | |
| | | GTAGACCGAAGTCCAAATTACA | |
| | | ACACATGA | |
| | | CTCTATGGCAAGAAAGAGTGAA | |
| | | AAAATAAAGCAACCCTGGACAC | |
| | | ACGCCAGATGACGGCCGGGCCC | |
| | | ATGAGAAACTCCAGAGAGAGAA | |
| | | AAACGCACTAAACAGAAATAGC | |
| | | AGTGCAGGCACCACATCCTTGC | |
| | | TCTCTGATCCTTTGTGAACTAT | |
| | | GATCGCTCCCCTTCACAAAATT | |
| | | ATAAGCCTCTCGAGAGCAGGGT | |
| | | ACGATGAAGTGTCAAGTGCTGG | |
| | | GTGCCCACCTTTCCTGTCAGTC | |
| | | CAGTCATC | |

SEQ ID NO: 418

| | | | |
|---|---|---|---|
| 349456 | SCAFFOLD | GTAGGTGTCCAAAACTATATTA | T/G |
| | 285028_33288 | TTGATTGTTTTATATGTGAGTT | |
| | | GGAGAAAGATGCATAAAAATGT | |
| | | CTAAGCATGCTAGAATTCTCTT | |
| | | TATTTATTTTTTGGCTGCACCA | |
| | | CTCAGCTTCCAGGATCTTAGAT | |
| | | CCCTGACCAGGGGTTGAGCCCA | |
| | | GGCCTTCACCAGTGAACGTGGT | |
| | | GAAAGCACAGAGTCCTTGGGCC | |
| | | ACCAGGGAACTATCTAGAATTC | |
| | | TTCATATAGCCATGATGGAGTA | |
| | | ACTGGTAT | |
| | | AGACTTACCCTCTTATCATGAA | |
| | | GTACTATGAGTAAGTGTGTCAC | |
| | | TTAGTCATGTCTTACTCTTTGT | |
| | | GACCCCGTGGACTGTAGCCCAC | |
| | | CAGGCTCCTTTGTCCAGAGAAT | |
| | | TCTCCAGGCAAGAATACTGGAG | |
| | | TGGGTAGCTATTCCCTTCTCCA | |
| | | GTGGATCTTCCCAACCCACGGA | |
| | | TCAAACCCAGGTCTCCCACATT | |
| | | GCAGATGGATTCTTTACTATCT | |
| | | GAGCCACCAGGAAAGCCCGAGA | |
| | | ATACTGGA | |

SEQ ID NO: 419

| | | | |
|---|---|---|---|
| 349492 | SCAFFOLD | CTCCAATAATGTTTATTCTTCA | T/C |
| | 295327_16712 | AGTTCCAGAAGGGCCTTTTTTT | |
| | | TAAAAAAGCCATTTCACTTTAT | |
| | | TAGAAATCAACGGTGCCCTGTG | |
| | | GGCCACTAGGCTGGTCTCTAAA | |
| | | TGGAACTTCAGGGCGTCTTTAC | |
| | | GTTTAGCAATTTATCAAGGACT | |
| | | ATTGAAGACTAGTGCTAGAGAT | |
| | | GTCGCACTGAGCAAACAAAGCC | |
| | | TCATAGAAACAAAGCTACATAG | |
| | | TTATCTTCTGGGAGTTTTTGTG | |
| | | TGTTCTCA | |
| | | GGTAACATCTCAGGTTTTTGAA | |
| | | GTGTGGGTTGTCCCACACTATC | |
| | | CTAAAGTACAAAAGTCATGAGG | |
| | | ACAAAAATTCCCTTCTGCTGTT | |
| | | GCAGCTGTAGGGTCACCTAGTG | |
| | | CCTTATTTAATCAGCTGATAAA | |
| | | CCAGCATATTCCTCTCCAGCCA | |
| | | TAAAGCAAGATAAGAGCTCAGA | |
| | | AGTCATCATTCCCCTCCCTTGC | |
| | | TTCTCTCTCTACACATGTACCT | |
| | | GTATCTATTATATACTTAACTC | |
| | | AGAGTCTG | |

SEQ ID NO: 420

| | | | |
|---|---|---|---|
| 349564 | SCAFFOLD | AGGGAAATTGGGAAGATTAAGG | A/G |
| | 321782_19330 | ATAGCTTTTTAATCAAGACTCC | |
| | | TAACATTTCCTCTCAAGGCCAG | |
| | | GCACATAGCAACCAACAAGCAA | |
| | | TCATAGCAACAGTGAATGATAA | |
| | | ACATCTATGGAAAATAACAAAA | |
| | | CAAAGAGGCATCAAGCTTTAGT | |
| | | CTAGATTATGTTATGATTCTTT | |
| | | ATGGACAGTTCAGAAGCCATCA | |
| | | AAGCAGTATTTCCTTCAAAGCT | |
| | | GAGAACAGAAGCACGATGTTGG | |
| | | CACACACC | |
| | | TTTATTTCATCGTAAATACACT | |
| | | TGTTAAGTACCAGGTTCGAATC | |
| | | TTTTTGCTTCTCTGAAAATCTG | |
| | | GATAAGTCACCAAATTATTTTG | |
| | | AAATTGAAGGGTATAGAGAGAA | |
| | | GGTAACTAATATACTAAAATAC | |
| | | CTGAGTACAATGGAATGATTTT | |
| | | TGCATTATAGAGAAAAAGCACT | |
| | | TACGTTACCTTAGTGAAAAGTT | |
| | | GCCAGATAGTGACTACTCAGTT | |
| | | TCCAGAATGCTGTCACCTGAGC | |
| | | CTGATTTA | |

SEQ ID NO: 421

| | | | |
|---|---|---|---|
| 349583 | SCAFFOLD | GTCCAGATGCCTTGGCAATCCA | A/G |
| | 35711_6569 | GAATGCAGTCAAGAATTAAGTA | |
| | | GGAAAAAATAATCTGAAAAACT | |
| | | CAGTGATTATTCAAAAGTCTGG | |
| | | TTACTAGTATTTATGTATTTAC | |
| | | TAATACAAGCCCTTGTTTAGCT | |
| | | CTCATGGGTAAAACCTTTCTTT | |
| | | TGTAAGTTTTTAAAAAGTTGAT | |
| | | ATTTGGTTTCTCAATCCACAGT | |
| | | ACAATGGAAAAAGCCTTGAGGG | |
| | | GAGGGCTAGGGTGGAGGAAGAT | |
| | | CTCAGAG | |
| | | CTACAGAATCTGTTACAGTATT | |
| | | ATTACTGGTTATTAGAAAGTAG | |
| | | ATTAAAACCTACCCAAAGTAGG | |
| | | CAATGGAACAAAAACATAGAAA | |
| | | TCAGAATCTATTTAGCAGGATA | |
| | | TCCTATACCTTAGTCATCTTCG | |
| | | GGGAAAATAATCACAGTATATC | |
| | | GCCTGACAAAAACATAGTAACC | |
| | | AAACAAATTTTAAATAAATGTT | |
| | | TGCTATATTAAAATAGAACAAA | |
| | | AAGGCTTAGCGTGTGATTTTTC | |
| | | ATGTTTTT | |

SEQ ID NO: 422

| | | | |
|---|---|---|---|
| 349616 | SCAFFOLD | AGGAGCTCTCCGCTTCCCCACG | T/C |
| | 50203_8741 | TCCTGCCTGTCATCTTCTCAGA | |
| | | AAGGGCTTCCCATCCTTGACTT | |
| | | GTCCGTCTTATGGCTCTGTCCA | |
| | | TCCAGAAGCCACTTTTCTGATC | |
| | | CCCAAGCCCTTGTAATCAACCT | |
| | | TCATCTGCCCTCAGGTATCAGC | |
| | | ACGATCCATCTTTTTACATCGT | |
| | | CTATCATATTCAAATGATCACA | |
| | | AACATACCAGCAAAATGGGTTA | |
| | | ATAGCTCTGACTGCTTATTAGT | |
| | | ATAAAACG | |
| | | TAATGCGGAGACTACATGAGAA | |
| | | GAAGAGAGGCCAAGTTCTTAAT | |
| | | GCCAAAGGGGGATTAATGTATG | |
| | | AATTTCTGCCTATCTTCTCATT | |
| | | TGCTTTCTCGAGAGTCATCACC | |
| | | ATGAATTACAACCACTCTCCTT | |
| | | CCTGACTCAGTACCCTCTAGGG | |
| | | CATCTCTTCATCACAGGAGCCT | |
| | | CCTTTCTTATAGCTTTGTCTTC | |
| | | ATTACTGCCCCAGAGAGGAACA | |
| | | ACAGGAAGAAGAAAGTTAATGC | |
| | | AACTTCTT | |

SEQ ID NO: 423

| | | | |
|---|---|---|---|
| 350226 | SCAFFOLD | TCCAAAGAACACCCAGGGCCAA | A/T |
| | 265287_28176 | TTTCCTTTAGAATGGACTGGTT | |
| | | GGATCTCCTTGCAGTCCAAGGG | |
| | | CCTCTCAAGAGTGTTCTCCAAC | |
| | | ACCACAGTTCAAAAGCATCAAT | |
| | | TCTTCAGCACTCAGCTTTCTTC | |
| | | CCAGTCCAACTCTCACATCCAT | |
| | | ACCTGACCACTGGAAAAACCAT | |
| | | AGCATTGAATAAGTAAGTCATA | |
| | | GCAAATAAAAACTTTGTAGTGA | |
| | | TTCTGTTTTTTCCCATCAGAAT | |
| | | GCTTTTTT | |
| | | AATCTTGGTCAGAATGTTCAAA | |
| | | AGCATCTGAGGCAGAGTTCATT | |
| | | AAAAACATTTTTGTAAATGCTT | |
| | | GTCATTTTGAAGCAGTACAGAA | |
| | | AGTTTAAATTAGTATAAATTTT | |
| | | GTCAGAATTTATAGCTATAACT | |
| | | CACATAAGACTGTTTATCCATT | |
| | | TCCCCTTTTTGTTTAGCAGTGC | |
| | | TATTAATGGTTTCGAAAAATAA | |
| | | CATATTCTCTGTCATAATGTTA | |
| | | TCTTATGTTTTAGTAGATTTTT | |
| | | CTGATGGC | |

SEQ ID NO: 424

| | | | |
|---|---|---|---|
| 350519 | SCAFFOLD | GAAGCCCAATCTTTGTCATACC | T/C |
| | 76695_628 | CTCTATAATTTCACTTCTGTAT | |
| | | GTCTGTTTACATGTCTATACAG | |
| | | TTATTTGCATGGCTGTCTCTTG | |
| | | AACATGGAAGAATGCCATCAAT | |
| | | GTTGGCATCTTTAATAGCAGGG | |
| | | GTCAGCAAACATTCTGTGCAAA | |
| | | GGACCAGGGAATAATATTTTAG | |
| | | GATTGTAGACCATATGGTATCT | |
| | | GTTGCAACTACTCAGTCTGCCA | |
| | | TTGTAGCAAATTGAAAGCAATC | |
| | | ATAGACAA | |
| | | ATGTAAATGGATGGGGATGGCT | |
| | | AAGTCCCTATAAAACTTTATTT | |
| | | ACAAAAACATACGGCAGGCAGG | |
| | | ATTTGGCCTATGGACCATAATT | |
| | | TGCTAACCTCTGTAACAGAGAA | |
| | | TCTATAATATCCTTAATATTCT | |
| | | GAAAAAAAAATCATTAATGAAT | |
| | | AAAAAAACATATGAATGAACTA | |
| | | CAACAAACAATTCCTTTTTTTT | |
| | | CCCCTCAACTTTAAGCCACAAA | |
| | | TTAATCCTGGAATAAGTAAGCA | |
| | | TTAGACAA | |

SEQ ID NO: 425

| | | | |
|---|---|---|---|
| 350589 | IBISS4snp140 | GCCTAAGTTTCCTTTTGACCAT | A/C |
| | | CACCTCCCAGTAACAATTTACT | |
| | | GTCAATTCCATTTCAGAATGGT | |
| | | CAAGGCTTCTGTTGAAAAGATA | |
| | | ACATGACCAAGA | |

SEQ ID NO: 426

| | | | |
|---|---|---|---|
| 350590 | IBISS4snp186 | TCTGCACTTCACTCGGTAATAT | C/T |
| | | TAGCAAATCTCCAAATGTTAGC | |
| | | CACATTGTTTGTTTCCCTTGTA | |
| | | TGTTGTTTATTCATGATACTTC | |
| | | AATGCTGTAACT | |

SEQ ID NO: 427

| | | | |
|---|---|---|---|
| 350636 | SCAFFOLD | ACAACAGCTTGAGAAAAGAACC | G/T |
| | 105892_4523 | TCTCAGTAGCTCGGAGGGAACT | |
| | | GCTCCAAAGAGGCAGGGGAAGA | |
| | | AGACAGTTTATATATGATTTTT | |
| | | TGCTGGGGAATACATGAAGTCA | |
| | | AGCACACATCTTGATAAAAGTC | |
| | | TGCTGGTTACAAGGAACAGATA | |
| | | TCTTGATTATTGATTTTAGTGC | |
| | | TTTTCTATGTAGGGGAAGATGC | |
| | | AAGAATTCAGGCCTATTAAAAT | |
| | | CTTTCCTGAGATATACATTTAA | |
| | | CTATCTAA | |
| | | GGGCCTGTTTTTCCAAAGCACA | |
| | | GAATGCCCTATTCTGTTTTCTG | |
| | | TCTTTAATTCCTTTCAGGGTGC | |
| | | TGTCCATCAGTGACTGCAGTAG | |
| | | CTAATGACTTGAACCTTGTACA | |
| | | ACTGGACAATGAGCAGCATTCT | |
| | | TTCTTTTACAACTTTTAAGTAG | |
| | | CCTCTGAAAATACTTGACATAT | |
| | | TTTTAAAACATAGTCAAGGCTA | |
| | | TAAAAATTTTTTAAGTAAATTT | |
| | | ACAAACTTAGTTTCCCTTTTAA | |
| | | GTATTTTA | |

SEQ ID NO: 428

| | | | |
|---|---|---|---|
| 350721 | SCAFFOLD | ACTTTATTAATAGACACACAGA | T/C |
| | 146466_8003 | CACTTGTGAGTATTGCAGATCC | |
| | | TGCTTTTCTAGATGTAGGATGG | |
| | | AGTTGAGGTTCTGCATTACCTG | |
| | | CAAGTTCCTAGATGAACCATGC | |
| | | TTCTGGTCCATGGGCCACTCTT | |
| | | TAAGAGTATAAAGAGATGGCTC | |
| | | CCAAACTTGGTTGCGTATTAGA | |
| | | GCTGCTTGGAGAGCTTTTAAAA | |
| | | ATCAGGATGCCAGGCCACACCC | |
| | | CTGACCAGTTAGATCAGAATCT | |
| | | CAAAGTGA | |
| | | GCCTAGGAATCAGTATTTTTAA | |
| | | ATTTTTTATAGCTGATAAGGGC | |
| | | TTCCTAGGTGTCGCTAGTGATC | |
| | | AGGAACCCACCTGCCAAGCAGG | |
| | | AGACATAAGAGACACTGTTGCC | |
| | | ATCTCCAGGGGTCAGGAAGATC | |
| | | CCCTGGAGGAGGTTATGGCCAC | |
| | | CCATTTCAGTATTCTTGCCTGG | |
| | | AGAATCCCATGAACAGAGGAGT | |
| | | CTGGTGGGCTACAGTCCGTGGG | |
| | | GGTCATACAGAGTCGGACACGA | |
| | | CTGAAGCG | |

SEQ ID NO: 429

| | | | |
|---|---|---|---|
| 350780 | SCAFFOLD | ACAATTTAGGAAAAATTGTAGA | A/G |
| | 166988_3684 | ATACCTAAAAGTATCAATCAGT | |
| | | AAAAGCCATTCATAACAGAAGC | |
| | | TATGAGATGAAGGCATGAAGTT | |
| | | TAACTGAAGACAGTAAAACAAA | |
| | | ACAAGCCAAGACAGAAGGGTAG | |
| | | ATTTAATAAAGATAAAAGCAGT | |
| | | ATGTAATCAACTATAAATAAGA | |
| | | AAAATGGCCGAACTAATAAATA | |
| | | AACCAAACACCAAATCTCTGAG | |
| | | CAAACCAATAAACCAGAAATGC | |
| | | AGAAGTCG | |
| | | AAGCACAAATTCATAAAATAAT | |
| | | AAATGATGGAGGAAAAATCATG | |
| | | ATATTTGGAGGAAATTAAAAGA | |
| | | TTGACAAGAGGCTATGCTGTTC | |
| | | AACTATGCAAAAGTAATTGAAG | |
| | | ACCCAGTGAAAAAAGGAATATT | |
| | | TTTAAAAATTTTCAATACATTA | |
| | | AATTAATTCCAACACAAACAGA | |
| | | ATATTTATAGACCATTCACTAT | |
| | | GGAAAAACTGAGTTGTGAAAAT | |
| | | GCTAATCCTATGTCAAAAATCT | |
| | | AACTCAGA | |

SEQ ID NO: 430

| | | | |
|---|---|---|---|
| 350915 | SCAFFOLD | CTAGAACCAGCTGTATGTGTAG | A/G |
| | 235117_21328 | GGGTGGTAGGGAGATGTTCAGA | |
| | | GAAACTTAAAAACCACTGGATT | |
| | | CTGTGCCAGGAATTTGCAATTG | |
| | | TAGTAGGTGTGAATTTACTGAT | |
| | | GACCCATTGCCTTTTTTTACAG | |
| | | CAGTGTTTCTCCATTTTTTAAC | |
| | | TCATTCACAATTGGTAATTAAA | |
| | | AATCTCATCCTCCAGTGTCAGT | |
| | | ATAACCCTTACTCCATCACCCA | |
| | | GACTGAAAACCACTAATAATCA | |
| | | TGAAACAT | |
| | | AGTCTCTCTAGCTCCATTATTA | |
| | | ACACCAATATAATATGAATTTT | |
| | | AAACATTTAACTCTTCATTTGC | |
| | | AGGCATCACAGACTCCACCTTT | |
| | | TACCTGGTTACCCAAAAGGCAA | |
| | | AAATACACCCATCTATGGACAG | |
| | | AGTGTTAAAGAAACACTTGTCT | |
| | | TTGAAAAATGGCCAATTAACCT | |
| | | TCTAGAGCAGAAATCCTTTCTT | |
| | | AGAAGTAAAATCATCTAAAAGG | |
| | | AAAAATTCATTCTATTTAAATC | |
| | | CAATTCTG | |

SEQ ID NO: 431

| | | | |
|---|---|---|---|
| 350996 | SCAFFOLD | ATGAAACTATTCTTCCCAGAAT | T/C |
| | 265171_9293 | GAGTAATATTGTTCCCTTCAAC | |
| | | TCCATGCCTTTGCAAAATTCTC | |
| | | TTATTTTTAAAGAATGCTCTTC | |
| | | CCTGTTTGATCTGCTTAGCCAA | |
| | | TACCTACTCATTTTTTAAGACC | |
| | | CTGTGTTATGCTTTCTTTGATC | |
| | | ACTCCCACCTTCCCCAAGCTTC | |
| | | CTTCCCATGAGTTGACTATGTT | |
| | | CTTGTGTCACTATCTCTAACAC | |
| | | ATATCCTTATCAAATACTGTAA | |
| | | TACGATTA | |
| | | GTACTGACATCTTGTCTCCCCC | |
| | | ACTGTGACACCGAGAAGGGCCT | |
| | | GGTGGGACTCCTGGGCACAAAG | |
| | | CCTTTCTGTGCCCATGACCTTC | |
| | | CCTGAGTTCCAAGGGGGAAGAT | |
| | | ACAACAGTTGTTAGTTAGAGAA | |
| | | AGGANNNNNNNNNNNNNNNNNN | |
| | | NNNNNNNNNNNNNNNNNNNNNN | |
| | | NNNNNNNNNNNNNNNNNNNNNN | |
| | | NNNNNNNNNNNNNNNNNNNNNN | |
| | | NNNNNNNNNNNNNNNNNNNNNN | |
| | | NNNNNNNN | |

SEQ ID NO: 432

| | | | |
|---|---|---|---|
| 351065 | SCAFFOLD | TCCTCTGCTTTCTGCTAAATTT | G/A |
| | 295013_6281 | CCTTGCTCACCAGCATGTACCA | |
| | | TTTCCCAAGGTCTGCTTCTTAG | |
| | | GACTTCTCAAATCCCTGGTGCT | |
| | | GCCCCAGAAATGTGACAGTATT | |
| | | TGACTTCTCCAGAATAGTAACC | |
| | | AATCTCTGCTGCACCCTTAGGT | |
| | | TTCCCAGACACTTCTATAATGT | |
| | | GTGCTTCATCCAAGTTTTCTGA | |
| | | CTATTGTATTCCAAACCTCCAT | |
| | | CATGTTGAAGTCACCACTTATA | |
| | | TCACTTCT | |
| | | TGATAATCATTGCAATATGTCT | |
| | | CAATTTCTCTTCAACATAGGAC | |
| | | CTGTAACTCAGCTGCTGGGAGT | |
| | | GTGGTTGGCAGACATTATTTAG | |
| | | TTGTCAGTCCCAATTCAGCTGC | |
| | | CTCTTGGGGTGGCACTCATGTC | |
| | | ATGATTTGTTGACAGGAGGGGT | |
| | | ATGAGGCCTAGCTCAGAACAAC | |
| | | CCTGAAAGTCAGCTCTAGTTCC | |
| | | AAAGTGTTCCATGGGGTAGGCT | |
| | | AAGTCTGTAATTGAACCTCAGT | |
| | | TACACTTG | |

SEQ ID NO: 433

| | | | |
|---|---|---|---|
| 351089 | SCAFFOLD | GAGAATGAAAGAGAAGTTGATG | G/C |
| | 303739_1450 | AATCATACCAGTTATAGAAAAT | |
| | | TGCTAATTTAATAAGCATCTCA | |
| | | TTAGAATTTGCTATGGTGACTC | |
| | | TGAAGTTTAATGAGCAGAAATT | |
| | | TTCCCTCTAATTTTTCTGAAGC | |
| | | AGTGAGATGCCAGTGAACTGAA | |
| | | TTGATGCTATAATAATAGTACT | |
| | | TTCTCCTCTACTTTCTTCTTCA | |
| | | TGAGAAATCAGCCCACATATCA | |
| | | TGCAATTCACACTCACATATAT | |
| | | CAGTTGAA | |
| | | GAGTGTGAGAAATCAGAAATCA | |
| | | TATAATTTACAGTGTTTAAATA | |
| | | CATTACACAGCAGGTACTTCAA | |
| | | TATCCTGGTTGTAGCCTTCTGG | |
| | | TAACTAGTTCATGTGTATACTA | |
| | | TGCACACTCATAGACAGTATGT | |
| | | TTGTCTAAGATAGTAAATTAAT | |
| | | AATAAAAGCAATAACTACTGCA | |
| | | AAGACCCTTAATACACACAGTA | |
| | | CATACTTTTAAAAATTCTCTTT | |
| | | AACATAATTCCTTGTACTATCA | |
| | | TCTAGAGG | |

SEQ ID NO: 434

| | | | |
|---|---|---|---|
| 351131 | SCAFFOLD | CAATACTTGTATATTAATGTCT | A/C |
| | 323835_5603 | GAGAAATACTGTTGAATTGTTT | |
| | | CCCCCAGATCTAAAAAAATTTC | |
| | | AATAAAATTCATAAACGTATAC | |
| | | ATAAACACTTACACACATAGAC | |
| | | ATTACCAAAACCACAAGAAAAA | |
| | | CTTTTATTAATCTAATCTTAGG | |
| | | TTTACTTTTAAAAAACCTACTA | |
| | | TAATTATTTTACCTTTTACCCA | |
| | | TTGTAGGAATAAAGTGCTATAT | |
| | | ATGCAAATAAAGAGATGTGTTG | |
| | | CATTGCTA | |
| | | GTTCTTGTAAAAGAAACTAAGA | |
| | | ATGTCATTGGTTTTACCACAAA | |
| | | TGGTAGTCCTTTCTAGTATTAC | |
| | | TCCTATAGAAAAACATACCACA | |
| | | TTTTTTAAAAATCCTACATTAT | |
| | | AGTATCATTATTTACATCTGCC | |
| | | ACAATTATATCTACCATTATTT | |
| | | AACTGATTTATATGTGAGACAC | |
| | | ATTCATTTATGCAAGTTTCCAT | |
| | | TAAAAGGTCAGGGATAGGGTCA | |
| | | AGAACTCTAATTCTGACTTAGG | |
| | | AACAATCC | |

SEQ ID NO: 435

| | | | |
|---|---|---|---|
| 351334 | IBISS4snp991 | AAAGATCACACACTGAGAATCT | C/T |
| | | CTACACAATCTAGGCACAGATA | |
| | | ATCTAAACTAAACTACTGTGAA | |
| | | ATTCTGCAGTACTGAAGTACTG | |
| | | TATGTTGCCCTG | |

SEQ ID NO: 436

| | | | |
|---|---|---|---|
| 351593 | SCAFFOLD | GCAGCTTGGGCCCGGCATGGAG | C/T |
| | 234818_2292 | TGGTTCTCCTGGGACACCGGGA | |
| | | CTGGCTGGATTCTCTCCTAACT | |
| | | CAGCAGAAGTGCCAGGGCCATG | |
| | | CCAGTCACAGGGTAAAGTGGCT | |
| | | GGGGTGTGAGCCCTACACAGAG | |
| | | AGGGTCTGTAAAACCCTTCTTA | |
| | | CTGACTCAAGCCCTGACTCAGG | |
| | | CATTCTAGGATTTCAGGACTCA | |
| | | CCCAAACCTGATTAAAGGTGTC | |
| | | CAGAGGGCCTGGGGTTAACACT | |
| | | GAGTTGTT | |
| | | TTTAAGTACAAGATTATGGTTT | |
| | | CCAATAAAGTGGATTTGTGGTA | |
| | | CCTGAGGTGATTTTGTGGAAGA | |
| | | AAAAAAGGAAGATTAAAAAGTC | |
| | | TGTGTCAAAGTAGTATTTTGAT | |
| | | TAGACCAGAAGCATAATTTTAG | |
| | | AAAATGGAAAATAGTAGGGATG | |
| | | CCATAGGAAATGTGCTTGGGGC | |
| | | CTGCCCTCCCCAGAGGAATGGA | |
| | | GTCAATAAATCATCTCCCGCCA | |
| | | GTCCCAAGTTTTCAAGTGTGAT | |
| | | GTTTTCGA | |

SEQ ID NO: 437

| | | | |
|---|---|---|---|
| 351654 | SCAFFOLD | AGGGGCTGGCACAGCCTCTGAG | T/C |
| | 26216_19609 | GCTGTTGCAAAGTCTCAGCTAC | |
| | | CACCACCACCACCCCCGCCTTG | |
| | | TCAGTCTTATATAACACCGTCC | |
| | | ATGCCACACACCGCCACCTTGT | |
| | | CCCGCTGAGTCAGTGCTCCTGT | |
| | | GCTGCCCCCCAGGTCCTGTGTG | |
| | | GCAAGAATCCCCTGAAGCCCAG | |
| | | CGGCCCCCTGGGAAGGTGCGCA | |
| | | GAGCAGGCTCCGGGTTACAGAT | |
| | | GCAACTTCCCTCCCAGAAATGT | |
| | | TCCCTACT | |
| | | TAATCACTTTTTTAAACTTCAC | |
| | | AAACACAATCTCTGCACCGTGA | |
| | | TCAATTATTTAGCAGAAAATGA | |
| | | TGCATCGTGTTAGCAACTAGAT | |
| | | GGCATTTAATATGCCCCCAGAA | |
| | | TTCTAATGACATGCCGTCTTCA | |
| | | GAGGCCTAATGCAAAGTTTCCC | |
| | | CTGCCCATGTTTTTGAAGACTT | |
| | | CCCAGAGTGGAAAAGAGCCAAG | |
| | | ATCTATATGCTCTCAGTTGATG | |
| | | TCGGATGTAGGTGGCCCCTGGA | |
| | | ATGTAATC | |

SEQ ID NO: 438

| | | | |
|---|---|---|---|
| 351663 | SCAFFOLD | CTGTGTTAAAACTTACATATAG | C/T |
| | 266133_5910 | TAGGCATTCAATGTTTTTATTA | |
| | | CTATCATTATTTTACATGTCAA | |
| | | TAATGATATAATAAAATGTAAT | |
| | | TTTATTACTATATAATAATGAA | |
| | | TGAGATAACATAACAGTAATAA | |
| | | AACCTGTTTCTATTTCAAATAT | |
| | | TTTTATCAACATACAATTAAGG | |
| | | GAACCCTTGTCAATTAACTCAT | |
| | | TAACAGATATTAAGTAACTATA | |
| | | TGTTATAGGCAGTGTTTAAGTC | |
| | | TTGAGTTA | |
| | | TCAGTAGAACTGATCTTTAATA | |
| | | TCATGGGTATTTCACACTGATA | |
| | | AAAGTAACCATACATAAATAGC | |
| | | AATAAAACAAATAAGCAAAAAA | |
| | | TAGATAAGAAAAATATTGGAAA | |
| | | ACCATAAGAGTGCTTAGAAATA | |
| | | TACTTTACACAGAAGTGACAAT | |
| | | GTGAACTAATATCTGCATGTGG | |
| | | AAAAAGATCAAGTTAGGTAAAT | |
| | | CTTTTGACACTGGATAAATAGT | |
| | | TGACTGAAAACACTAATATATT | |
| | | TCTCAACTT | |

SEQ ID NO: 439

| | | | |
|---|---|---|---|
| 351687 | SCAFFOLD | TCAATTATTGTCTTGTAATAGA | G/A |
| | 277056_3839 | CAAAGAATATTACTGGTTGATT | |
| | | CTTAAAGATAACTGTCCACTGA | |
| | | ACTGAACTGTACTATGATTCAA | |
| | | ATGATTTTTTAAAACAATGTAT | |
| | | TTATAAAGAAATATATTCTGAA | |
| | | CTATGTACAAAGTTATTTTTGT | |
| | | GTACTATTATGATATGTATATA | |
| | | TTTTCAGTTCCATGTGTTTACA | |
| | | GTTTAATACATCAAGGAACAAC | |
| | | CATAATGATAATAGTTTATATT | |
| | | TAGCAAGT | |
| | | TTTACTATGGGCCACACACAGT | |
| | | TCTTAATGATTTCCGTATATTG | |
| | | ACTGAATTCCTACAATATTCCT | |
| | | ATGAGATATACTATTATTATTC | |
| | | TCATTTAATATATCAAGGAAAT | |
| | | GGACCACAGTGAATTTTAAGTA | |
| | | ATTTGCTCAAGCTAATGAGTGG | |
| | | TGGAATCAGAGTGTGAAATCAG | |
| | | GCATATAGTTCCAGAGTTTTTG | |
| | | TTTTTCAGTTCTTTTCAGTTCA | |
| | | GTCGCTCAGTCATGTCCAACTC | |
| | | TTTGCGAC | |

SEQ ID NO: 440

| | | | |
|---|---|---|---|
| 351724 | SCAFFOLD | GTAGTAATCTCTGCTCACTTGT | A/G |
| | 295446_12626 | TAGATATTACCAATGAGATAAA | |
| | | TACAGTGGATTGCACTTATCAA | |
| | | TTATTCAGCAGTGTGTAAATTC | |
| | | AGCTACTTAGAAAGTTGTCAAA | |
| | | ATATTCTCAGAATAGCAGCAAT | |
| | | TCTTAAATGAACTATAGATACA | |
| | | TAGATCTTAGAACATGTACCAT | |
| | | GATTAGCCAGGATAGCAGGCAA | |
| | | AAAGTAGAGTTTCTTTGTTTTC | |
| | | TTCTTTTTTTTTTTTCTTTGTT | |
| | | TTCTGACA | |
| | | TAGCTCTCGAAGTCAATTTTAG | |
| | | CTGGCTCTAAGGTCTAGTTTGG | |
| | | AGAGAGAAAGAAGAAAAACTAA | |
| | | GAAAAGAGCAGAAGCTGGCATA | |
| | | AATGTAACAATTAGAAGTAACT | |
| | | ATAAATAGTGGAAAGCTATTCA | |
| | | CTGAAAGCAGCAGTAAATGACA | |
| | | GAGAACAGGAACAGAAGTGAGG | |
| | | GAGAAGAGAAGAAAGAACACTG | |
| | | AGGCAACTGATCTTTTCAGTTT | |
| | | AATAGCCTAAAAAGTACCCTAG | |
| | | TATTTGAG | |

SEQ ID NO: 441

| | | | |
|---|---|---|---|
| 351743 | SCAFFOLD | TTATGACTTCATGGACTATAGA | A/C |
| | 301712_12074 | GTCCATGGAATTCTCCAGGCCA | |
| | | GAATACTGGAGTGGGTAGCCTA | |
| | | TCTTTTCTCCAATGGATCTTCC | |
| | | TGACCCAGGAACTGAACCAGAG | |
| | | TCTCCTGCATTGCAGGCAGATT | |
| | | CTTTACCACCTGAGCTATCAGG | |
| | | GAAGAATTCAATATCGGCATTT | |
| | | TTTTTTATATCAGCACTTTGAA | |
| | | ACTGGAATTTCAGTGTCTTTTG | |
| | | ACTTTCATCATTTTAGATGAGA | |
| | | TTAGGGCT | |
| | | AGTTTTATTGTAGTTCCTTTGA | |
| | | CAGGAATATATTTCTTTTTCTC | |
| | | TGATACATACTTTTTCCTCTGT | |
| | | GAATTTTAGCAGTTTTACTGTC | |
| | | ATGTGCCTAGAGGTAGTTTCTT | |
| | | TGTATTTATTCTGTTTTGGATT | |
| | | CATAATTTACTTTGAATATTAG | |
| | | GATAATCTCCTTCATTAATTTT | |
| | | GAAAAATGATTGGCTGCTCTTT | |
| | | TCAAATATTGTTCCGTCTCCTT | |
| | | TTCTCTCTCCTTTCCAAGGGGA | |
| | | ACCCTATT | |

SEQ ID NO: 442

| | | | |
|---|---|---|---|
| 351863 | SCAFFOLD | TAATTATATGTTATTTGTTGAT | A/G |
| | 59158_530 | AGCTTCTCATAAAGAAATAATT | |
| | | TTAAAGAAATGATAACCCTCTG | |
| | | TCAGGATCTAAAAGTGATTTCA | |
| | | GGATTCCAGTGCCTCTGAACTG | |
| | | ACAGCAATTGTTGCACAAGGTG | |
| | | ATTGAGGTGGAAAATGGAAGAC | |
| | | AAGAGCTCCATCTTCTCTGTCT | |
| | | CTGATACATCTTAGAAGCCTAT | |
| | | TTCTTCTTAACTAAATATATGA | |
| | | TCTTTTTGTTATGTTTACCTTT | |
| | | AGCCTACA | |
| | | TGTAGCTTGTTTTACAGAAAAA | |
| | | GTATCTCAAATAGCATCAACTC | |
| | | TATTTTTGGAAACATAAGCATT | |
| | | CTTTTAAATTTAAGTAGTCTTT | |
| | | TTCAAGGTTACTTTTTTCCCAT | |
| | | CACAGATCATTTCCAACCTTCC | |
| | | CATTGTTTTTTCATTATCAACA | |
| | | TATATTCTGTTTTTCTGAACCT | |
| | | ACACAAGCTTTATCATTGCATG | |
| | | TTTTAAGAAGCATTTTCTTAAA | |
| | | GTCCTTAGATTATTCTGTCTAT | |
| | | CCATTTCT | |

SEQ ID NO: 443

| | | | |
|---|---|---|---|
| 351993 | SCAFFOLD | GCCCCTTTGTGTAACAAGCTTT | T/C |
| | 114762_1553 | CAAAAGAGGCAAAACGTGGGAC | |
| | | TTCAGGATTCACTAACCGATCA | |
| | | TAAGTGTGACCCCAAGGGTTGT | |
| | | GTGACCAGCAGAACCCAATGAA | |
| | | GCTTCAACCTTAGAATATAGCC | |
| | | ATCCCATGAGGTTCATGTTTAC | |
| | | TGTGCTTCCCTGGAAGAGAAAG | |
| | | AAAAAAAATCATCATAATTTTC | |
| | | ATTTGTATCTGTCCTGCTTGAA | |
| | | AAAAAAAAAGATGTGAGTAGCT | |
| | | TAGAGAAA | |
| | | AGGTATAATAGGGATCATTAAA | |
| | | AAACAGATAATTATATAAAAAA | |
| | | AAAACACTACAAGGAAAAATAA | |
| | | CAACCTAAGATAAAGCCACAGC | |
| | | TAAGATTACTACACAAAAATGG | |
| | | CAACTTATAGAAAATGCTAGTA | |
| | | TTCAAAACAGCACAGTACATCT | |
| | | AGAACTTCCTAGTAGCCCAAAC | |
| | | AAAAATAAAACACAAGTTACCA | |
| | | AATTTACAGGGTACCCAAGACA | |
| | | ATAATAAACTTTGGCTCAGAAA | |
| | | AAGCACAG | |

SEQ ID NO: 444

| | | | |
|---|---|---|---|
| 352138 | SCAFFOLD | GTTTGCAGAATCTTATTTTATA | C/G |
| | 190076_2021 | AAAGCAATTCAAGTCAGTGGAA | |
| | | CTGAACAAGGAAAAAAGAATGG | |
| | | AGAACAAAGAATTCCATTCACA | |
| | | TATTTATAAAACTAGAGCTATA | |
| | | TCTGTTATATCTCTGAAAGGCA | |
| | | GAATGATATAGCAATTATTACA | |
| | | AACACAGTTGTTTGAATATATA | |
| | | CTGACAGACATTCCACTCCTCA | |
| | | AAATTAAAGAATCATTTTATCT | |
| | | TCAGGGTTTCAATTTTAATTTG | |
| | | AGCTAAAT | |
| | | CAAATCGAACTAACCATGGATG | |
| | | TTTATTCCCCTTCTTTTTGGAC | |
| | | CAGAAAACAAGAAACAAAAATA | |
| | | TGTGTTTTTCGACTGATCCTCA | |
| | | CTTCTCCACATGAGGATTCTGC | |
| | | CTGCAGACCCTGTTGCAGAAGC | |
| | | TTGGATACACATGGTGATGAAA | |
| | | GGTCATTTTACAACTTCACATG | |
| | | TTCCAGATGGAGACTCTTGAGA | |
| | | AAGAATCTCTTTTCTGGTAAAA | |
| | | GCCAGAAAAAGAAACTTCACAC | |
| | | CATTTAAC | |

SEQ ID NO: 445

| | | | |
|---|---|---|---|
| 352221 | SCAFFOLD | CATTTGATTTCTGCATTGTATA | A/T |
| | 236442_327 | CAGTGTGTGAAAACTATGTGAT | |
| | | ATATAGTGAACTTCATTATTAA | |
| | | TTTCCTTGTCCATAGTTACAGG | |
| | | TTAAAACAGCCTTGTGTTGACA | |
| | | ACATAACAACACCAAAATTAAA | |
| | | AGACTATTTCATCATATTTATA | |
| | | CTTTTACATTAGTACAGATTTT | |
| | | GGAAGATGAGTTACTGTTGAAT | |
| | | AACAAATCAGAGCCTCGCTCTC | |
| | | AATTTTTCCTCACGATAGTGAT | |
| | | CCATTTCT | |
| | | TTTAAAACTCTCAATTTCATAT | |
| | | GATTTAATTTAACTTGATTATA | |
| | | AAGGTTAAGTTTAGGGTTATAA | |
| | | AAAGTCATTTTCTAGACTTAAC | |
| | | TGAATTTAGTTTGAAAATCCCA | |
| | | GAATTCGATTTATTCAATGTGA | |
| | | ATAAAATATTCACATATGATTT | |
| | | CAGAGCATTATTATAATTCCAA | |
| | | TTTTAATTTTAACTTCTTTGTT | |
| | | AAGGTACTAGCTCCAATGTAGT | |
| | | AAAATGCATTTGATAGTAACAC | |
| | | TCAAAATA | |

SEQ ID NO: 446

| | | | |
|---|---|---|---|
| 352556 | SCAFFOLD | CATGAGCATAATTGTTGGATGC | C/A |
| | 125013_22381 | TATTTTATTACATATGATCATA | |
| | | CCTGAATTTTATTTGTGTCAAT | |
| | | CAAGTGCTGTGCCATGGATTTT | |
| | | AGGATAATTGCAAAGAAGAACC | |
| | | AGGAATGCTGTTAGGAAAAGAA | |
| | | AAGACAATCAGAAATTTATTAT | |
| | | CTTACAGCAAAGTAATGATAAT | |
| | | TCTGTTCTTTACAACATGCGAT | |
| | | ACTATAAAATCTTTATCTTGGA | |
| | | ATGTATTCTTTGAAATTAAATG | |
| | | CATCAGAG | |
| | | AATAATATAGTCTCCATGATGT | |
| | | TAGGATCATCCTTAGCAAAATT | |
| | | CTAATGGGAAATGTAAATACCA | |
| | | GATATTTCTGTTTCCCAGTCAT | |
| | | CTCTAAGACTGTATAACACAAG | |
| | | AAACTGGCTTATTTGACATGGC | |
| | | TGATTAGACAGTCGTCTTAGGA | |
| | | AATACTTATTCATGGGGTGTTC | |
| | | TACCTGTTTTCCTTAAACAAAA | |
| | | CTAAATGTTGTAGCAGGCCCAC | |
| | | CCCTCACATTACGATGGGTAGA | |
| | | GGCGAGTA | |

SEQ ID NO: 447

| | | | |
|---|---|---|---|
| 352701 | SCAFFOLD | CCTTTCCAAGTACTGGGGAATG | C/A |
| | 205002_91700 | TTTAAGAGCACACATAAACACA | |
| | | TAGCCATCAAACTGATTTGAAT | |
| | | TGGACAAAATAAACAAAATCTG | |
| | | GTCTAAATGGGAGTTTGTTCAG | |
| | | TTATGTCTCTCAGTTTTCAAAA | |
| | | GCCTTGAAAGAAAAATTCACAG | |
| | | CTTGAATGTCTCAAAAGAATCT | |
| | | TCCAGGGGGTTAACAGATTTGT | |
| | | TTATTAATAAAAGCTAAATCAG | |
| | | AAGGAACTTAAATTACCTCTGC | |
| | | TTTCACA | |
| | | TATTTTAAAGAGGAGATTTTCA | |
| | | TACTGGTTAGGGACTGCCCTAA | |
| | | ACAATTCTCTGAAATGGGCAAT | |
| | | ATCAGTTTGTAAATGTAAAGAT | |
| | | TCATTGGCCACTGAAACTCAGA | |
| | | GACTGTCAAATAGCTTCCATTC | |
| | | TCTCATTTCACAGACAGGAAGC | |
| | | CAACACAAAGGAGAAAAGAAGC | |
| | | AACCTGCTCCAAGTGTATAACT | |
| | | TGGTAATAGAATTCAGATTAGA | |
| | | ACCCATGCCTTTGAGAGCAAAA | |
| | | GTTTTTTT | |

SEQ ID NO: 448

| | | | |
|---|---|---|---|
| 352760 | SCAFFOLD | ATACTTTCAGAGCCTCCATCTC | A/G |
| | 245260_13707 | AGGGCCTCGGATAGTAGCATCA | |
| | | GATGTTTGTAGCAGGAAGTCAA | |
| | | ATTTAATCGGTTTCTCTGTGAC | |
| | | AGATTTAAAGTCCATCAGGTCC | |
| | | TGGGGAAAGATCATCTGAAGAG | |
| | | CCAGAAGATGAGCTCATTTGCC | |
| | | TCTCCTCAAAGACAAGTTAGTG | |
| | | AAAAAATTCAACAGAGGAGTGT | |
| | | TTAGCAGGTGGAAGCTCATAAA | |
| | | TCTGTCAGCAAACTTTACTGAC | |
| | | CATATACA | |
| | | GAAATTAGGTTATGCTTTTTTT | |
| | | TCCCTTACCTCCAGTGTCATTT | |
| | | TGAATTATGTACTCTGCATTAT | |
| | | GGAGAGACCAGCTTCTTCCTGG | |
| | | CTGCTAGCCAGGCATTTGGAAG | |
| | | ACAGGAATTGGTTTTATTTTTC | |
| | | TATCAACCTGTTTCTGATTCAG | |
| | | ATTTTAGGGTGACATATAGTCA | |
| | | GTATCAGGTTAAAAAAATAATC | |
| | | TGTTGTAGGTCAACCAACCCAC | |
| | | TTTCAATTATACTCAACGGCAT | |
| | | ATAATTGG | |

SEQ ID NO: 449

| | | | |
|---|---|---|---|
| 352783 | SCAFFOLD | TGTAAGCTTCTGTTTGGTGCCT | T/C |
| | 259826_8971 | CTCTTTCTTGACTTCTAATAGC | |
| | | CTACCCCTGAAGCTCTTTTAGG | |
| | | AGTGTTTATTCAGAATCAAGAC | |
| | | CATGCAATTGAGTTCTGACCAA | |
| | | ATCAGTGTAGGTGGAAGTGATG | |
| | | TAAATGGTTTTGAGAGCTGGTT | |
| | | ATTTAAAAATAGTTAAATGTTG | |
| | | CCTTTTGGTAATGCATGATAGA | |
| | | AGGAGCTCAGAATTCTGAGTCA | |
| | | CTGAGAAAACTATCCCCAATTT | |
| | | ATAAACAA | |
| | | CTCTGTAACCCAGAAATAATTC | |
| | | TCTATTTATTGAAATCACTGAG | |
| | | ATTTTAAAGTTTTTTTTTGGTT | |
| | | ACTTAATGGACTGGTTAGTCTA | |
| | | GTCCATTTTGACTAACACAGCA | |
| | | TCCAAACTTCGCTAATGTACAA | |
| | | TTTGTCAATCAACAGAAGACTT | |
| | | AAATAAATATTTGTTGCATAAT | |
| | | AAACATTATTTGCATTATAAAA | |
| | | TTCATAAAATATAAAAGACAAA | |
| | | TTAAGAGTTTAAAAAAATAGAC | |
| | | TTTCCTCC | |

SEQ ID NO: 450

| | | | |
|---|---|---|---|
| 352915 | SCAFFOLD | AGTAGATACACAAGTCACTGGT | T/G |
| | 40648_11101 | ACACAACACATGTTCTTACTGA | |
| | | TAAGTAGCATATATTGGCTTAA | |
| | | AGTAGGAAGACCTCAGTAAGAA | |
| | | ATTAAAGAATAAGTGACAAAGC | |
| | | AAAGCCATGACATGAGGGAAAA | |
| | | TATTGTCTATTTCTAACACAAG | |
| | | AACAACAGTTCCAGTCAAAAAG | |
| | | TCTAGAGTCAAATAAACGTGCA | |
| | | ATCACACAAACACTGTAATTCT | |
| | | TTCATGTTTCAATATCTACTTT | |
| | | TTTATAAT | |
| | | AATCGGTTACCAAGAAGTCCTT | |
| | | AACTGAATGATGAAACCAACTT | |
| | | ANNNNNNNNNNNNNNNNNNNNN | |
| | | NNNNNNNNNNNNNNNNNNNNNN | |
| | | NNNNNNNCAATTTTATGAAGTA | |
| | | TTGTTATTACTTCTGTATACTT | |
| | | GCACTAAGAACTTTAAAATAAG | |
| | | CCTAATCCACTGAAAAATTCAA | |
| | | TATATAATTATTAAACAGTGCC | |
| | | TTGAAGAATATATTCCCACTGT | |
| | | AGAAAAGGATTACTAACAGAAC | |
| | | TTGTGGGA | |

SEQ ID NO: 451

| | | | |
|---|---|---|---|
| 352985 | SCAFFOLD | GGAACGACTTGGGCTCTATGGT | A/G |
| | 85236_15670 | GACCTAAACGGGATGGAATCCC | |
| | | CAAAAGAAGGGATGTATGTACA | |
| | | TGTATGGCTGATTCACTTTGCT | |
| | | GTACAGCAGAAACTGACACAGT | |
| | | GGTATACAGCAACTGTGGTCCA | |
| | | ATTAAAAAAAATAAAGGCAAAT | |
| | | TGATGGAGAACACAAAGCATTT | |
| | | ATATTATTTTTCAAAAATAATG | |
| | | ATTTTGTCACTAAAATGCCCTC | |
| | | TTATACCAAATACCATGTATTT | |
| | | ATTTGAGT | |
| | | GGTCTTATATAGGTTCTTCACC | |
| | | CAAACACATGTATACCTGTGGC | |
| | | GGATTCATTTTGATATTTGGCA | |
| | | AAACCAATACAATATTGTAAAG | |
| | | TTTAAAAACAAAAACAAACAAA | |
| | | AAAACTTGTGTAAACCAGGCCC | |
| | | ATTTCAACACAGAGTCGAGAAA | |
| | | GTACATTTCACCTCTAAGTTTT | |
| | | AAAGGTGATGTGGTGTTTGTTA | |
| | | CTGTTACGTAGCACAGAGAAAA | |
| | | TATTTAAGCAATCACAATAAAT | |
| | | GAATTTCGT | |

SEQ ID NO: 452

| | | | |
|---|---|---|---|
| 353039 | SCAFFOLD | GGTGACTCAGTAAAGAATTCAC | C/A |
| | 109850_10815 | CTGCAGTGTAGGAGACACAGGT | |
| | | TCAATCCCTGCATCAGGAAGAT | |
| | | CCTCTGAAGAAGGAAATGGCAA | |
| | | GCCACTCCAAGATTCTTGCTTG | |
| | | GAAAATCCCCTGGACAGAGGAA | |
| | | CCTAGTGGGCTACAGTCCACAG | |
| | | GCTCACAAAGAGTTGGACGTAC | |
| | | TGAGCACACATGCACAGGGACG | |
| | | GTGTATTCAGTAAATAACTTCA | |
| | | ATTTAATGAGATTTCAATGTGC | |
| | | CTTTATAA | |
| | | TAACAACTATTTTTGAGTGATT | |
| | | TTTTTTAAAGGCATTTTCAAGT | |
| | | TTAAACTGCAGTGAACCACTAA | |
| | | TCTGCTTTCTGTTTCTATAGAT | |
| | | TTGCCTGTGCCTGACATTTTAA | |
| | | ATAATGGAATCATACACTGTGT | |
| | | GACTTTGAGGTCTGTTTTTTTT | |
| | | TTTTCCACTCAGCATGATGTTT | |
| | | TTGAGGTTCATCCACTTGTAGC | |
| | | ATTGTCAGAACTTCATTCCTTT | |
| | | TTATGGTCAAACAATATTTCTT | |
| | | TATGGACA | |

SEQ ID NO: 453

| | | | |
|---|---|---|---|
| 353054 | SCAFFOLD | GCTGGGGCAGGAGCTGGCCCCC | A/G |
| | 121064_3755 | TCTCTTCCTCTCTCAGATGCCT | |
| | | CTGAATTCTGAATTTACCGTGT | |
| | | CAAGTAGCTCTGTTCTAAAATC | |
| | | CTCTACATCCTTCCTGGGTTGT | |
| | | TATAGAGAATCTGTCCTTGAAA | |
| | | ATTATGCTCAACAAGCTAATGC | |
| | | TGTTTCAGTTCGGATTTTATTC | |
| | | ATGTTCTGCTTATTATAAGTGA | |
| | | CAGGAAACCTAGTCGAAAACTT | |
| | | CTTAAGTGAAAATGAAAATTTT | |
| | | GCTCCTAA | |
| | | ACTAACACAATATTGTAAATCA | |
| | | ACTACACTTCATTTTTTTTTTT | |
| | | AAAGGAAAACTTCTTGTCCCTT | |
| | | TAGTGTAAAAACGCAGGGACTT | |
| | | CCCTGGTGGTCCAGTGATTAAG | |
| | | CCTCCGTGCTTCCCCTTCCAGT | |
| | | GCAGGGGGCAAGGCTTTGCTAC | |
| | | CTGGTTGGGGAACTAAGATCCC | |
| | | ACATGTCATGCAAGCAAAAATA | |
| | | TAAAAGTAAGATTAAAATAAAA | |
| | | TGCAGGGATTTCAGCCATGGCT | |
| | | GAATCCAG | |

SEQ ID NO: 454

| | | | |
|---|---|---|---|
| 353060 | SCAFFOLD | AAGACTCTGGCAGGCTACACTC | T/C |
| | 125013_22651 | CATGGGGTCAAAAAGAGCTGGA | |
| | | CATGACTGACTGACTAACACTA | |
| | | TCTCTGGGGGAGGCTAAGATCT | |
| | | CACATGCCTTGCTAGCAAAAAA | |
| | | CCAAAACATAAAAGATAAGTAA | |
| | | TATTGTAACAAATTCCATAAAG | |
| | | ACTTTAAAAATGGTCCAGATAA | |
| | | AAAAATTCTTAAAGCAGTGAGC | |
| | | ATAAATCAGTAAGGTTTAGAAA | |
| | | ACAAATAAAAATGGAACTAATA | |
| | | AGAGCATA | |
| | | TCATTATTCAGAGAATATTCAT | |
| | | GAGCATAATTGTTGGATGCTAT | |
| | | TTTATTACATATGATCATACCT | |
| | | GAATTTTATTTGTGTCAATCAA | |
| | | GTGCTGTGCCATGGATTTTAGG | |
| | | ATAATTGCAAAGAAGAACCAGG | |
| | | AATGCTGTTAGGAAAAGAAAAG | |
| | | ACAATCAGAAATTTATTATCTT | |
| | | ACAGCAAAGTAATGATAATTCT | |
| | | GTTCTTTACAACATGCGATACT | |
| | | ATAAAATCTTTATCTTGGAATG | |
| | | TATTCTTT | |

SEQ ID NO: 455

| | | | |
|---|---|---|---|
| 353318 | SCAFFOLD | TAAAACTAATCAGAACAGATTT | A/C |
| | 316764_15803 | CCTGGAGCATGAAACCCTAACT | |
| | | AGGTTCTCTACTAAAATGTACA | |
| | | CTAAAGTCAGCTCCAAAGTATG | |
| | | ACTCAACTCAGTGGAGTATTTG | |
| | | CCTAAGCATTCCAGAATAGCCA | |
| | | GGGTAGGTGATGCACACAGTTT | |
| | | GTTGACGTGAGCAAGGAAACAT | |
| | | GAAAGAGATCTGCTTAGAGATC | |
| | | TGGGAACTATGTTTCATGGTTT | |
| | | GCTAATATGAGTTATTATTAGC | |
| | | AATCAGCA | |
| | | TTCTTAAAGATCAAAAAAAAGT | |
| | | ATACAAAGAAGAGAGAGGAAAG | |
| | | TGTGTTTAGCTTTTAAATATGT | |
| | | ATCATAAACCACAACTTAGATC | |
| | | TGTTTTCTGGTGATTTGGCTCC | |
| | | ATTATTTTTCCAGATGTCATTA | |
| | | TTCCTATTTTTTAACACTACCC | |
| | | ATCTGCAGAAGGGCTCAAATAT | |
| | | TCAAACCCCACCACATAGCTTT | |
| | | TCCTGTCTATATATCTAGTCTG | |
| | | ACTTCATCAAACACATACACAT | |
| | | TTTTTTTT | |

SEQ ID NO: 456

| | | | |
|---|---|---|---|
| 353634 | SCAFFOLD | CTCTTTAAAATCTAACCTTTCT | T/C |
| | 306770_1012 | TCTTCCTGTCTTCCACTATGAT | |
| | | TTCCCATACTGGAAAGCTCAGT | |
| | | TTTAGTGAAGGTCTATGTTAGC | |
| | | CCCTTGTTTCTCATTAACTTAG | |
| | | ACCATGACAGTGAATGTCCTGT | |
| | | CACTGATGGCAGAGAAAATCAA | |
| | | GAAGATGAGTAATTAGATGGTC | |
| | | TGGAAGATTTCCTATCTCAAAT | |
| | | TTACTTCATGCTGTCCCTGTTG | |
| | | TTTGTTTTTCTTCCTTTGATTA | |
| | | AGTACCAA | |
| | | CAAAATGAAATTAAAATTAAAA | |
| | | GATGCTTACTCCTTGGAAGAAA | |
| | | AGTTATGACCAATCTAGATAGC | |
| | | ATATTGAAAAGCAGAGACATTA | |
| | | CTTTGTCGACAAAGGTCCGTCT | |
| | | AGTCAAGGCTATGGTTTTTCCA | |
| | | GTGGTCATGTATGGATGTGAGA | |
| | | GTTGGACTGTGAAGAAAGCTGA | |
| | | GCGCTGAAGAATTGATGCTTTT | |
| | | GAACTGTGGTGTTGGAGAAGAC | |
| | | TGTTTAGAGTCCCTTGGACTGC | |
| | | AAGGAGAT | |

SEQ ID NO: 457

| | | | |
|---|---|---|---|
| 353643 | SCAFFOLD | CTAGAGGGAAGAAGACAGCTTT | G/C |
| | 316920_18038 | GAGAACTTTTGGGAGGCAAATA | |
| | | GGACTTGGTGATTGATGGCATG | |
| | | TGCCAAGTCAGGGAGTTAGAAG | |
| | | ACTCCAAGATGAATCTTGGATT | |
| | | TCTAATGTGGACCAATGGACAT | |
| | | TTAATGAGAAACAAAACTTAGA | |
| | | AGAGGCAAATTTGGGGGAAACA | |
| | | ATAGTGATGACAAGTTAAACTT | |
| | | TGGCCTTAATGAGTTTGATGTG | |
| | | CCTGTGAAGGCTTATAATTATA | |
| | | TAATACTG | |
| | | ATTTCAGTACAATAGCAACTTT | |
| | | TTTTTTTGGCTGCATCAGGTCT | |
| | | TCACTGCATTATGGGGAGTCTT | |
| | | TCATTGTTGTGCAGATTCTCTA | |
| | | GTTGTGGTGTGTGGGCTCCGGA | |
| | | GTTGCAGCATACAGGCTTAGTC | |
| | | ACTCCAAGGTATGTGGGATCTT | |
| | | CGTTCTCCCCTGCATTGCAAGG | |
| | | CAGATTTTTAACCACTGGACCA | |
| | | TCAGGGAAGTCCCACAATGGCA | |
| | | GCTTTGAAACCTCTGTCTGTGT | |
| | | GATGTTGA | |

SEQ ID NO: 458

| | | | |
|---|---|---|---|
| 353681 | SCAFFOLD | NNNNNNNNNNNNNNNNNNNNNN | T/C |
| | 60886_7763 | NNNNNNNNTCATTTCCGACTCT | |
| | | TTGCAATCTCATGGACTGCAGT | |
| | | ACACCAAGCCTCCCTGTCCTTC | |
| | | ACCATCTCCCAGAGCTTGCTCA | |
| | | AACTCATCTACTGAGTCAGTGA | |
| | | TGCCATCCAACCATCTCATCCT | |
| | | CTGTCGCCCCCTTTTCCTCTTG | |
| | | CCCTCAATCTTTCCTATCATCA | |
| | | GGGTCTTTTTCAGTGAGTCAGC | |
| | | TCTTGCACAATAAAAAAACTTT | |
| | | ATAATTCA | |
| | | GCCATTTAAATCCCAAGATAAC | |
| | | TTTATATGGTTAGCATTTTTAA | |
| | | AAAACATCTCATTGCTTCTTAT | |
| | | GCAAACGAAAGTAAAAAATGAA | |
| | | GTCTCTCAGAAACTGATATTAA | |
| | | GCAGACCAAAACCAACTCTTAA | |
| | | GAATGTAGATTTAAACATCATA | |
| | | ATTTAAAAATCTGATCGAGCAG | |
| | | ACAGAGAATTCTCTACCCCAAA | |
| | | ATAATGTCTTAAATTTATTTAG | |
| | | AACATCTAAAAAATGATTGGCT | |
| | | TTGCTGGT | |

SEQ ID NO: 459

| | | | |
|---|---|---|---|
| 353752 | SCAFFOLD | TAGAAAACAAATAAAAATGGAA | C/T |
| | 125013_22437 | CTAATAAGAGCATATTCATTAT | |
| | | TCAGAGAATATTCATGAGCATA | |
| | | ATTGTTGGATGCTATTTTATTA | |
| | | CATATGATCATACCTGAATTTT | |
| | | ATTTGTGTCAATCAAGTGCTGT | |
| | | GCCATGGATTTTAGGATAATTG | |
| | | CAAAGAAGAACCAGGAATGCTG | |
| | | TTAGGAAAAGAAAAGACAATCA | |
| | | GAAATTTATTATCTTACAGCAA | |
| | | AGTAATGATAATTCTGTTCTTT | |
| | | ACAACATG | |
| | | GATACTATAAAATCTTTATCTT | |
| | | GGAATGTATTCTTTGAAATTAA | |
| | | ATGCATCAGAGCAATAATATAG | |
| | | TCTCCATGATGTTAGGATCATC | |
| | | CTTAGCAAAATTCTAATGGGAA | |
| | | ATGTAAATACCAGATATTTCTG | |
| | | TTTCCCAGTCATCTCTAAGACT | |
| | | GTATAACACAAGAAACTGGCTT | |
| | | ATTTGACATGGCTGATTAGACA | |
| | | GTCGTCTTAGGAAATACTTATT | |
| | | CATGGGGTGTTCTACCTGTTTT | |
| | | CCTTAAAC | |

SEQ ID NO: 460

| | | | |
|---|---|---|---|
| 353800 | SCAFFOLD | GTCTTTGCCCTTAACCATTATC | A/T |
| | 180695_15239 | CAAGAGGACCTCATGTCATTGT | |
| | | CCGACAGCTACCCAGCTATCAC | |
| | | ACATATTAAAATTAGCCCAATG | |
| | | TGCAATCAAGTCCATTATTTTT | |
| | | ATTTTTGTCAAATAGGGTTTTA | |
| | | AAGATTTGGTACATATATTTGA | |
| | | CCTTTTAGAAAGTTTCTTCTTC | |
| | | TTACTGAACACTGACTTTAATT | |
| | | ATTGAGGTACACTTCAGTTATG | |
| | | TTACCGTGTCTATTAAAAAAAC | |
| | | TTAACAAA | |
| | | ATTTTTGCAAAATAAATCTTGA | |
| | | CATACACTTTTCCTGTGTTCAG | |
| | | TTTAAAATTTTACTTCCTTCCT | |
| | | AAAACAATCTTGGTTCCTTCAT | |
| | | GATATAAATTTCCTTAAAGTTG | |
| | | GTGTTATCATGGCTTACCCAGA | |
| | | GCTAAAGATTATTTTTCTTTGT | |
| | | GACCGTCAGACATCAGGCATAA | |
| | | CTCGTAATGCAGAAGGCAAGCT | |
| | | ATCACAAACTGAGTTGAAGTAA | |
| | | GTTGTCAAATATGTGTTATTAG | |
| | | AAAGTCTC | |

SEQ ID NO: 461

| | | | |
|---|---|---|---|
| 353868 | SCAFFOLD | TCCCCGACCTGGGATCAAACCC | G/A |
| | 281020_16166 | AGGCCCCCTACATTTGGAGCAT | |
| | | GGAGTCTTAGCCCCTAGACTAC | |
| | | CAAGGAAATACCAATATGTGTG | |
| | | TAATTTTTAGCTTTAAATACTA | |
| | | GACGTCCTTGTCCGTATTTTAT | |
| | | CATCCTAATCTTTTTTTAGTGT | |
| | | ACTGCTTATAGAAATCACTAAT | |
| | | ATTCCTCTCGTCACCGGTGATG | |
| | | TGGAAAAAACATTTTGGTTTCT | |
| | | AACAGTTCATAGCACTTCTATT | |
| | | AATGCTTC | |
| | | TATCATAAGACAAAATATTAAA | |
| | | TTGAAATGAGAAAAAGGTGAAT | |
| | | GCCTAAGACCTGAACTGTTTTG | |
| | | CATACCTTGATCTCTCCATTGC | |
| | | AAGGTTACTTAGATGCTGGTGG | |
| | | GAGGAGGTTTAAATAGCTTTAA | |
| | | TAGTGCTGGTTTTATCAATTGC | |
| | | TGGTTATATCCATAACCTCATG | |
| | | GGCAATTGCTCAGTGAAAACCC | |
| | | AAGAAGCATTTTGTATCTATTT | |
| | | GAAACATACACACACTCATTTA | |
| | | AATACACA | |

SEQ ID NO: 462

| | | | |
|---|---|---|---|
| 353896 | SCAFFOLD | GCTGCCGTCTCTGGGGTTGCAC | T/C |
| | 35672_327 | AGAGTCGGACACGATTGAAGCG | |
| | | ACTTAGCAGCAGCAGGAACATA | |
| | | ACAGATAGTTCTCTGCCACTAT | |
| | | TCCAAAGTTTGACTCATAAGAA | |
| | | AGACCTAACAGAGTTTCTCTAT | |
| | | TATGCAAACATTCTCTGCAAAT | |
| | | GAGTCTGTCAAGGAAACATTTT | |
| | | TCCGAAAACTGTGTCTGTTAAC | |
| | | AGTGCTTGCATACTTACTTCTA | |
| | | CAATTTAGAATCTATTGTTTTT | |
| | | TCTCTACT | |
| | | GGTTTTTATTTTATGGTAATGT | |
| | | AGGCTTTTTCCAGTTAAAATAA | |
| | | TAAATACCTTTGTTATACTCAA | |
| | | AACATTCTTTATACATTAAATT | |
| | | GGTACAAATAACATAAAGTCTA | |
| | | TTTGAATTTAAAAATACAATTC | |
| | | ATTCTCTCATTACTACCCTGAC | |
| | | AAGTTACTAACATTTTAATTCA | |
| | | GAAAATAATTGATGTTATATAA | |
| | | GATTATTTACTTAACAATGCTT | |
| | | TGAAATTTAAAAAGCTGTATAC | |
| | | TATTTCAA | |

SEQ ID NO: 463

| | | | |
|---|---|---|---|
| 353926 | SCAFFOLD | GAAGGTATTGTTAGATATAAAT | T/C |
| | 70018_40019 | TGGATCATATATGAAGGAAGTT | |
| | | AAATGCCAAAGGAATTTTCCCA | |
| | | AGACTTTTCATTTTTCACTGAA | |
| | | CTCATCTAGGAAGGGAAAATAT | |
| | | GAAAGGATATAGGAAAATAATG | |
| | | TTGTGATGTTGATGCTTGTATT | |
| | | TAAAGGCAGAGAGAATTTAAGA | |
| | | CAACTTGTAATTTTGAACTAGA | |
| | | AACATTTATAAAGAAGCACTGA | |
| | | GGACCTAAAATTTGACATCAAA | |
| | | GGTAAATG | |
| | | TGAATGAAAATCTTAAAACCTT | |
| | | TTATAACTAATTATAATTTAGT | |
| | | ATCATCATGAGAAATTTGTATG | |
| | | CAGGTCAGGAAGCAACAGTTAG | |
| | | AATAGGGCATGGAACAACAGAC | |
| | | TTGTTCCAAATAGGAAAAGGAG | |
| | | TATGTCAAGGCTTGAGAACNNN | |
| | | NNNNNNNNNNNNNNNNNNNNNN | |
| | | NNNNNNNNNNNNNNNNNNNNNN | |
| | | NNNNNNNNNNNNNNNNNNNNNN | |
| | | NNNNNNNNNNNNNNNNNNNNNN | |
| | | NNNNNNNN | |

SEQ ID NO: 464

| | | | |
|---|---|---|---|
| 354055 | SCAFFOLD | GCAGTTTTACTGTCATGTGCCT | C/T |
| | 301712_11749 | AGAGGTAGTTTCTTTGTATTTA | |
| | | TTCTGTTTTGGATTCATAATTT | |
| | | ACTTTGAATATTAGGATAATCT | |
| | | CCTTCATTAATTTTGAAAAATG | |
| | | ATTGGCTGCTCTTTTCAAATAT | |
| | | TGTTCCGTCTCCTTTTCTCTCT | |
| | | CCTTTCCAAGGGGAACCCTATT | |
| | | GCATATATCTTAGACCTTTTAT | |
| | | CTATGTCATCTATGTTTCTTAT | |
| | | GATCATCTCTGTTTTTTGATAA | |
| | | TTTTATTA | |
| | | TGGTTAGTTCTAATCATTACTT | |
| | | TCCATGCCTTGAACTGGCCAAA | |
| | | TCTCCCCTCACCTCAGTGCCTG | |
| | | TACACGTGCTCTGTCTGGGTCA | |
| | | CGGTCTCCCTTTACCTTGCCTT | |
| | | TGCCTTAAGTCACTTATTATTC | |
| | | AAGTCTCGGCTTAGCTTAACTC | |
| | | TCTCTAGGAAACCTTTTATGAC | |
| | | CCCTAAATTCTTGCCTAGATTC | |
| | | AGAGTACTGTGTTTTTTCCTCA | |
| | | GTGATATTTCTTATCCCCCTCA | |
| | | TATTCAAAA | |

SEQ ID NO: 465

| | | | |
|---|---|---|---|
| 354135 | SCAFFOLD | TTCTAAGTAATTCCTTTCAAGA | A/T |
| | 155226_731 | AATCAAAATTGAAAGTATAAGC | |
| | | TCTTTAGGACTGAATGACAGTG | |
| | | GGAATATTGAATACAAATAACT | |
| | | ATGAAATTCAGCTACAGTCATA | |
| | | CTCTGGAGAAAATTCAGAATTT | |
| | | AATGCCTTTGTTATTACACAAG | |
| | | AGACTAAGCATTCAACTCACTC | |
| | | ACATAATAAAAATAACACCATA | |
| | | AGAAATCTAAAGAAAGGAAAAG | |
| | | GATATAATAAATATAAAACTAG | |
| | | AAATCAAT | |
| | | GATAAGCAAGCAAAAGTAGAAA | |
| | | AATAATGGATAAAACTAAGAAT | |
| | | CTGACCTCTGGTGGGAGTGAAG | |
| | | GGATTAATAACAGATACATTTT | |
| | | TAGAAAAACAAATTGGTTACCA | |
| | | AGTTCACCTGAAAGAACAAATA | |
| | | AAGACCATTGGTTAAAAATGCA | |
| | | AGACTGAAAACATGCATTTAAC | |
| | | CTTCACTCTCTCCTGAAATCCT | |
| | | ACAAAAATGAGAATAAAGGTAT | |
| | | TTTTCTCTTTGTTTGATTTTTG | |
| | | CGTAAATT | |

SEQ ID NO: 466

| | | | |
|---|---|---|---|
| 354174 | SCAFFOLD | AGTATCTTGGTTGAGACAGGAA | G/T |
| | 260431_8099 | TGACAACCATGCCTGCTTGTCA | |
| | | GAGTTTTAAACTTTGGAGACCA | |
| | | AAATAGGCTTTATAAGCTGCCA | |
| | | CTAAAAAGAACAGATAAGATTT | |
| | | AAATACACAATGAGAAGATAAG | |
| | | AATCAACTTGGACCATCCTCCT | |
| | | CAGACTTGGGCAAAGCTAAAAT | |
| | | AAGTGGAAATATCACCGCAAGA | |
| | | ACAGTGAGGCAAGCTGACTGGG | |
| | | GAGAAGAAAAACATTTTAAAAG | |
| | | TATGAGAC | |
| | | ATATATTTAAAAAACTGTCAAA | |
| | | GAAGCCTCAAATTAAAGATCCC | |
| | | AAGAAGAAAATAAGGAGATCTA | |
| | | GAAGTAGATGAACTAGAGAAAA | |
| | | AAAGCGGAAATAGATTAAGAAG | |
| | | GTGAAGACAAAGAAGTGGATTC | |
| | | TATATCAAAGGGGGAAAATTGA | |
| | | TAAGTTAAACAAAATAGTATGA | |
| | | AAACTACAGGGTAAAATATAAA | |
| | | AATAATAGAAGAAAATCACATC | |
| | | TTAATTGATAATATGTCTGGAA | |
| | | TGCAGACT | |

SEQ ID NO: 467

| | | | |
|---|---|---|---|
| 354182 | SCAFFOLD | GAGCTCAACCTAAAATGAAAAG | C/T |
| | 280379_12043 | TTATGCATCCAGTAAATTTTTC | |
| | | AAGAGGCAGTTCATTTTTATGC | |
| | | TTATTATTAACTTTCATTATAT | |
| | | TCATTAAAATGTTCAACTTTAT | |
| | | CCTAAATCACCTAAATCTTCCA | |
| | | TGAGCTCTGCATGTGGAAAAGA | |
| | | AGTTGGCAGATGCTTAATTTGG | |
| | | AGAAATTGCTTACTTTTGCATA | |
| | | AAACTAATTTTTGTAAGAGCCA | |
| | | GGAAAATATTAGAAGAAATTAT | |
| | | TTATGTGC | |
| | | TAAAAATTCAAACATTTTGGTT | |
| | | TTGAACAGAGGCATAAAGAGAA | |
| | | TACATCTCATATACTTTGGAAG | |
| | | AAAGCCTCAGATGTATGAAACT | |
| | | CAAAAGGAATGAATAATAGCAA | |
| | | CTTATTTGCTGGGCAGGAGTCA | |
| | | ATCAATTCTCACTTATTTAATG | |
| | | AGTTAGGAAACAGAATGAAGGT | |
| | | GGGGTAATTTTCAAAACACATC | |
| | | TTCCACAGTCCTTGTTTACAGT | |
| | | ATATTTATAATTTACCTGGGAA | |
| | | TACAAGGC | |

SEQ ID NO: 468

| | | | |
|---|---|---|---|
| 354184 | SCAFFOLD | TTGATTGAATTTGCTCAAAAGA | A/C |
| | 285028_33668 | AGATAGCTGCACTGTTAATCAT | |
| | | ATTTATTAGTTGATCTTAAGAA | |
| | | TTCATGCATTTAATTGTTCTAG | |
| | | AATTAGAGATAAACCTTGGAAT | |
| | | TATGACTGTGAGAAATGGCCAA | |
| | | GAGTTTCATTGGGGATGACAGA | |
| | | AGGCAATGCTGAGCAAGAAGGA | |
| | | GGTTTGAAATCCTGCATTAATT | |
| | | CTAGAGTTCATCAACCTATGAC | |
| | | TATGGAAATCTCGATATATTTG | |
| | | AATTGCAA | |
| | | AATTTATAAAAAACTCTTAAAT | |
| | | ACTTTTTGTCCTTCTGTTTTCT | |
| | | CCTTCAATATAAGCCTACAAAA | |
| | | TTATAAGGTACTTAAGTGTTGG | |
| | | GACCATGTCTCTGAATCTTTAA | |
| | | TAACAAACACACTCTCATAGTA | |
| | | GGTGTCCAAAACTATATTATTG | |
| | | ATTGTTTTATATGTGAGTTGGA | |
| | | GAAAGATGCATAAAAATGTCTA | |
| | | AGCATGCTAGAATTCTCTTTAT | |
| | | TTATTTTTTGGCTGCACCACTC | |
| | | AGCTTCCA | |

SEQ ID NO: 469

| | | | |
|---|---|---|---|
| 354282 | SCAFFOLD | TAAATTGCTAAGTCAAAATGAC | T/C |
| | 195918_13722 | AATATTTTGAATAAAATTTATA | |
| | | TAAATTATGATGCCATAAAAGT | |
| | | ATATTATTTTTAAAATTGAATT | |
| | | AGTAATTTCATAACAATCACTA | |
| | | ATTAGTGATTTTACAGCTGAGT | |
| | | GTTAGTCATTCTTCCATACTCT | |
| | | GTCTGCCTTTCTTGCACTTAAA | |
| | | ATGTCTATTTGTCTAATTGGAG | |
| | | CTTTTTGTTCTAATTTGGGATA | |
| | | ATATCATTAACTTTTTAAAATT | |
| | | CTTCACCA | |
| | | GTTTTAATGATCAATTACTTTA | |
| | | TATTCTTAAATGTTAGTTACAA | |
| | | TAATATTTTACTCACAAATTTC | |
| | | CATTGAAAATTTTCATGTAAAA | |
| | | TAACTCCAGCAAATATTAACAT | |
| | | GGCTCATTTTACCCAAGCAATT | |
| | | GTGCTTTCATTTCTTTTATATT | |
| | | GAGAGATAGTATAGCCCACGAA | |
| | | GGACACAGACTCTGGCATCAGA | |
| | | CTTTCTGCATTCAATCTGTTTG | |
| | | CAGCCATATAAATATGTGACCT | |
| | | TGAACAAA | |

SEQ ID NO: 470

| | | | |
|---|---|---|---|
| 354414 | SCAFFOLD | ATCTAGAACACAATCTTTAACC | C/T |
| | 120581_8000 | TAGTAGTAATTTTTCTTCAATA | |
| | | GATGTAAATGCAAATTTGAGAA | |
| | | AAAATTCAAATATTAGTTGGTT | |
| | | AACGTCTCATAGAATGCATAAT | |
| | | TAATCTAAGTCTAAAATATGTA | |
| | | AACTTAGAAATTCTGAATCAAT | |
| | | TGATCATTGATATTACTAGAAA | |
| | | ATGTTTAATTATGTAAGCAATT | |
| | | CTTTGTTAACTGAAAGGATTTC | |
| | | ACTTTTTAAAAATATCTATATC | |
| | | TTTTTCTT | |
| | | CATAATTTTAAGCAAAATTTTC | |
| | | ATAACAAATAATTTATTTTTGT | |
| | | CCTCTATCCATATAATTATAAT | |
| | | ATTTTATTATTTTGAATGAATT | |
| | | TTGAAGGTTAAACATTTCAATG | |
| | | AAAATTAAACAACTGGATCTGC | |
| | | ACACAGCGAAGCTATTGCCCGA | |
| | | GGTATCTGGTGTACTGTTACAA | |
| | | GGAAGTTTTATGATATGTATTG | |
| | | TTTATCTCAACCTACATCTTAC | |
| | | CATATCTTAGATGTCTGCTAAC | |
| | | TAAGATTA | |

SEQ ID NO: 471

| | | | |
|---|---|---|---|
| 354455 | SCAFFOLD | TCAACGGACATAAATTTGAGCA | C/T |
| | 334643_69 | AACTCCAGGAGACAGTGAAGGA | |
| | | CAGGGAAGCCGGGTGTGCTGCA | |
| | | GTTCATGGGGTTGCAACAACTC | |
| | | GGATACAACTTAGAGACTGAAC | |
| | | AACAACATATGGCAGAAGAAAA | |
| | | TAACTGATCATTCTAGCTGCAT | |
| | | TCATAATAAAATTTGAGATGAG | |
| | | AAATTTGATCATTTGAGATGGC | |
| | | CATGGGAATGGATTCAATTATA | |
| | | GCTAAAAATCTACTAAATATCT | |
| | | ACTACATA | |
| | | CTATGTTTTTAAAAATGTGTTA | |
| | | TAACTGAAGGTTTCTTTGGGTA | |
| | | AAGCAACTAGATTGTCCTGTCC | |
| | | AC | |

TABLE 18
Further SNP associated with intramuscular fat
deposition

| Ident | Scaffold | SEQ ID NO: |
|---|---|---|
| 342547 | SCAFFOLD220683_1125 | 472 |
| 342599 | SCAFFOLD312276_9056 | 473 |
| 342822 | SCAFFOLD115102_212 | 474 |
| 342867 | SCAFFOLD150792_11786 | 475 |
| 342874 | SCAFFOLD152075_3289 | 476 |
| 342901 | SCAFFOLD170266_2103 | 477 |
| 342907 | SCAFFOLD180556_11337 | 478 |
| 342939 | SCAFFOLD205027_17860 | 479 |
| 342957 | SCAFFOLD220223_540 | 480 |
| 343085 | SCAFFOLD61841_3624 | 481 |
| 343112 | SCAFFOLD92148_5123 | 482 |
| 343173 | IBISS4snp406 | 483 |
| 343273 | SCAFFOLD128805_3090 | 484 |
| 343365 | SCAFFOLD17903_1700 | 485 |
| 343384 | SCAFFOLD190167_18200 | 486 |
| 343386 | SCAFFOLD190221_16495 | 487 |
| 343403 | SCAFFOLD199393_2655 | 489 |
| 343487 | SCAFFOLD25039_6855 | 490 |
| 343513 | SCAFFOLD263303_2666 | 491 |
| 343584 | SCAFFOLD310380_2422 | 492 |
| 343688 | SCAFFOLD70184_5981 | 493 |
| 343714 | SCAFFOLD85708_9285 | 494 |
| 343858 | SCAFFOLD116206_487 | 495 |
| 343861 | SCAFFOLD1191_3524 | 496 |
| 343882 | SCAFFOLD125974_8130 | 497 |
| 343947 | SCAFFOLD155540_1585 | 498 |
| 343966 | SCAFFOLD165210_21228 | 499 |
| 343979 | SCAFFOLD170136_45658 | 500 |
| 343981 | SCAFFOLD170266_2028 | 501 |
| 343982 | SCAFFOLD170266_1888 | 502 |
| 344020 | SCAFFOLD190067_20138 | 503 |
| 344033 | SCAFFOLD195717_4245 | 504 |
| 344061 | SCAFFOLD206794_1935 | 505 |
| 344070 | SCAFFOLD213107_3591 | 506 |
| 344073 | SCAFFOLD215465_13068 | 507 |
| 344120 | SCAFFOLD240740_10374 | 508 |
| 344165 | SCAFFOLD260597_2435 | 509 |
| 344242 | SCAFFOLD295231_20757 | 510 |
| 344268 | SCAFFOLD308591_553 | 511 |
| 344298 | SCAFFOLD321801_15731 | 512 |
| 344342 | SCAFFOLD46484_3279 | 513 |
| 344344 | SCAFFOLD46716_2213 | 514 |
| 344362 | SCAFFOLD56714_469 | 515 |
| 344373 | SCAFFOLD60223_13631 | 516 |
| 344428 | SCAFFOLD86623_4947 | 517 |
| 344465 | IBISS4snp14 | 518 |
| 344472 | IBISS4snp154 | 519 |
| 344501 | IBISS4snp635 | 520 |
| 344568 | SCAFFOLD110655_10863 | 521 |
| 344576 | SCAFFOLD115003_498 | 522 |
| 344596 | SCAFFOLD125560_2483 | 523 |
| 344655 | SCAFFOLD150141_9327 | 524 |
| 344673 | SCAFFOLD155453_11913 | 525 |
| 344679 | SCAFFOLD156398_6086 | 526 |
| 344698 | SCAFFOLD165090_26679 | 527 |
| 344702 | SCAFFOLD170136_45529 | 528 |
| 344729 | SCAFFOLD185014_39638 | 529 |
| 344738 | SCAFFOLD190067_20228 | 530 |
| 344787 | SCAFFOLD206273_12652 | 531 |
| 344805 | SCAFFOLD216235_3404 | 532 |
| 344814 | SCAFFOLD220223_2601 | 533 |
| 344847 | SCAFFOLD230250_13663 | 534 |
| 344874 | SCAFFOLD240305_16330 | 535 |
| 344916 | SCAFFOLD25048_12981 | 536 |
| 344932 | SCAFFOLD255096_4540 | 537 |
| 344950 | SCAFFOLD2641_4426 | 538 |
| 344998 | SCAFFOLD282025_3342 | 539 |
| 345005 | SCAFFOLD285987_6043 | 540 |
| 345016 | SCAFFOLD291452_7280 | 541 |
| 345024 | SCAFFOLD295336_4564 | 542 |
| 345043 | SCAFFOLD300283_17094 | 543 |
| 345048 | SCAFFOLD303315_5993 | 544 |
| 345050 | SCAFFOLD30496_3799 | 545 |
| 345142 | SCAFFOLD55505_8936 | 546 |
| 345188 | SCAFFOLD70177_16365 | 547 |
| 345229 | SCAFFOLD83266_1276 | 548 |
| 345252 | SCAFFOLD90222_4388 | 549 |
| 345359 | SCAFFOLD106798_1888 | 550 |
| 345430 | SCAFFOLD135102_4826 | 551 |
| 345473 | SCAFFOLD15286_17074 | 552 |
| 345586 | SCAFFOLD186010_8596 | 553 |
| 345617 | SCAFFOLD201590_8431 | 554 |
| 345639 | SCAFFOLD210206_22955 | 555 |
| 345762 | SCAFFOLD25039_13622 | 556 |
| 345764 | SCAFFOLD25056_13176 | 557 |
| 345765 | SCAFFOLD25056_13047 | 558 |
| 345930 | SCAFFOLD308591_997 | 559 |
| 345974 | SCAFFOLD323635_4515 | 560 |
| 346001 | SCAFFOLD40330_13030 | 561 |
| 346006 | SCAFFOLD40979_2070 | 562 |
| 346122 | SCAFFOLD80060_16638 | 563 |
| 346157 | SCAFFOLD95077_5259 | 564 |
| 346192 | IBISS4snp499 | 565 |
| 346260 | SCAFFOLD110655_10681 | 566 |
| 346298 | SCAFFOLD130523_7121 | 567 |
| 346304 | SCAFFOLD131537_5113 | 568 |
| 346308 | SCAFFOLD135027_35999 | 569 |
| 346313 | SCAFFOLD136321_685 | 570 |
| 346314 | SCAFFOLD136467_4130 | 571 |
| 346369 | SCAFFOLD155993_1701 | 572 |
| 346380 | SCAFFOLD160202_23833 | 573 |
| 346419 | SCAFFOLD170266_2076 | 574 |
| 346467 | SCAFFOLD185315_13273 | 575 |
| 346575 | SCAFFOLD227097_1473 | 576 |
| 346587 | SCAFFOLD231905_9561 | 577 |
| 346612 | SCAFFOLD245097_12680 | 578 |
| 346615 | SCAFFOLD245243_1474 | 579 |
| 346635 | SCAFFOLD25039_13816 | 580 |
| 346674 | SCAFFOLD265658_20008 | 581 |
| 346676 | SCAFFOLD266100_4197 | 582 |
| 346705 | SCAFFOLD275389_15487 | 523 |
| 346809 | SCAFFOLD311747_37269 | 584 |
| 346870 | SCAFFOLD35718_5721 | 585 |
| 346914 | SCAFFOLD50887_11878 | 586 |
| 346945 | SCAFFOLD60682_7938 | 587 |
| 346988 | SCAFFOLD79504_1545 | 588 |
| 347050 | IBISS4snp483 | 589 |
| 347113 | SCAFFOLD106320_3036 | 590 |
| 347158 | SCAFFOLD126125_3685 | 591 |
| 347188 | SCAFFOLD136321_994 | 592 |
| 347218 | SCAFFOLD150215_5759 | 593 |
| 347227 | SCAFFOLD152016_5940 | 594 |
| 347228 | SCAFFOLD152016_5856 | 595 |
| 347231 | SCAFFOLD153002_7959 | 596 |
| 347248 | SCAFFOLD15986_9482 | 597 |
| 347291 | SCAFFOLD170799_16306 | 598 |
| 347326 | SCAFFOLD185336_7376 | 599 |
| 347384 | SCAFFOLD20573_13572 | 600 |
| 347385 | SCAFFOLD20573_13420 | 601 |
| 347424 | SCAFFOLD216837_2933 | 602 |
| 347434 | SCAFFOLD220021_8153 | 603 |
| 347440 | SCAFFOLD220733_6491 | 604 |
| 347461 | SCAFFOLD227180_6296 | 605 |
| 347501 | SCAFFOLD245021_7420 | 606 |
| 347533 | SCAFFOLD25332_9402 | 607 |
| 347599 | SCAFFOLD270624_13061 | 608 |
| 347606 | SCAFFOLD275_9222 | 609 |
| 347635 | SCAFFOLD281900_1531 | 610 |
| 347665 | SCAFFOLD295336_4448 | 611 |
| 347681 | SCAFFOLD300039_11689 | 612 |
| 347684 | SCAFFOLD300283_16976 | 613 |
| 347760 | SCAFFOLD337715_136 | 614 |
| 347761 | SCAFFOLD340752_551 | 615 |
| 347806 | SCAFFOLD46392_11621 | 616 |
| 347818 | SCAFFOLD50170_9319 | 617 |
| 347866 | SCAFFOLD65622_9619 | 618 |
| 347884 | SCAFFOLD70184_5962 | 619 |
| 347915 | SCAFFOLD80895_16576 | 620 |
| 347933 | SCAFFOLD87_22677 | 621 |
| 348058 | SCAFFOLD107820_1332 | 622 |
| 348065 | SCAFFOLD110184_3008 | 623 |
| 348104 | SCAFFOLD120672_10956 | 624 |
| 348149 | SCAFFOLD135282_16356 | 625 |
| 348151 | SCAFFOLD136321_1119 | 626 |
| 348152 | SCAFFOLD136321_807 | 627 |
| 348166 | SCAFFOLD140224_4081 | 628 |
| 348201 | SCAFFOLD152968_3124 | 629 |
| 348215 | SCAFFOLD155509_6872 | 630 |
| 348228 | SCAFFOLD160090_6137 | 631 |
| 348231 | SCAFFOLD160889_3126 | 632 |
| 348232 | SCAFFOLD160889_3290 | 633 |
| 348353 | SCAFFOLD206920_7355 | 634 |
| 348383 | SCAFFOLD216837_2774 | 635 |
| 348421 | SCAFFOLD230819_6392 | 636 |
| 348445 | SCAFFOLD240220_8809 | 637 |
| 348462 | SCAFFOLD246753_1482 | 638 |
| 348518 | SCAFFOLD265658_20627 | 639 |
| 348528 | SCAFFOLD268164_2677 | 640 |
| 348573 | SCAFFOLD285028_33324 | 641 |
| 348625 | SCAFFOLD303315_6102 | 642 |
| 348636 | SCAFFOLD306219_3093 | 643 |
| 348673 | SCAFFOLD322772_7036 | 644 |
| 348693 | SCAFFOLD36_14443 | 645 |
| 348726 | SCAFFOLD46484_3075 | 646 |
| 348753 | SCAFFOLD56714_336 | 647 |
| 348760 | SCAFFOLD57440_1204 | 648 |
| 348766 | SCAFFOLD60231_15046 | 649 |
| 348888 | IBISS4snp785 | 650 |
| 348912 | SCAFFOLD10204_22524 | 651 |
| 348933 | SCAFFOLD110132_5363 | 652 |
| 348940 | SCAFFOLD110655_10917 | 653 |
| 349013 | SCAFFOLD1401_4286 | 654 |
| 349048 | SCAFFOLD151694_4517 | 655 |
| 349070 | SCAFFOLD155739_12976 | 656 |
| 349103 | SCAFFOLD170266_1792 | 657 |
| 349144 | SCAFFOLD183469_2141 | 658 |
| 349152 | SCAFFOLD186010_9791 | 659 |
| 349153 | SCAFFOLD186028_9587 | 660 |
| 349197 | SCAFFOLD199519_2524 | 661 |
| 349256 | SCAFFOLD220358_6604 | 662 |
| 349258 | SCAFFOLD220986_9511 | 663 |
| 349265 | SCAFFOLD221810_557 | 664 |
| 349305 | SCAFFOLD231881_542 | 665 |
| 349306 | SCAFFOLD232808_795 | 666 |
| 349345 | SCAFFOLD250116_14342 | 667 |
| 349347 | SCAFFOLD250454_7761 | 668 |
| 349413 | SCAFFOLD27004_5586 | 669 |
| 349442 | SCAFFOLD280364_1108 | 670 |
| 349547 | SCAFFOLD313308_208 | 671 |
| 349571 | SCAFFOLD323674_1570 | 672 |
| 349580 | SCAFFOLD351875_395 | 673 |
| 349594 | SCAFFOLD40058_29791 | 674 |
| 349614 | SCAFFOLD5008_24057 | 675 |
| 349618 | SCAFFOLD50419_5418 | 676 |
| 349672 | SCAFFOLD70018_37068 | 677 |
| 349673 | SCAFFOLD70018_41330 | 678 |
| 349717 | SCAFFOLD90222_4848 | 679 |
| 349730 | SCAFFOLD92061_5686 | 680 |
| 349735 | SCAFFOLD95032_12466 | 681 |
| 349751 | IBISS4snp26 | 682 |
| 349777 | IBISS4snp1021 | 683 |
| 349814 | SCAFFOLD110929_383 | 684 |
| 349822 | SCAFFOLD115093_14103 | 685 |
| 349875 | SCAFFOLD135046_8927 | 686 |
| 349919 | SCAFFOLD150945_2291 | 687 |
| 349942 | SCAFFOLD158550_8551 | 688 |
| 349966 | SCAFFOLD170429_18521 | 689 |
| 349970 | SCAFFOLD172341_13427 | 690 |
| 350042 | SCAFFOLD195740_9619 | 691 |
| 350057 | SCAFFOLD201176_15817 | 692 |
| 350072 | SCAFFOLD205706_3317 | 693 |
| 350091 | SCAFFOLD211870_1750 | 694 |
| 350161 | SCAFFOLD245471_31606 | 695 |
| 350217 | SCAFFOLD265091_15662 | 696 |
| 350228 | SCAFFOLD265658_20099 | 697 |
| 350229 | SCAFFOLD265658_20229 | 698 |
| 350254 | SCAFFOLD275678_3653 | 699 |
| 350276 | SCAFFOLD281988_2093 | 700 |
| 350348 | SCAFFOLD311898_4113 | 701 |
| 350385 | SCAFFOLD323635_4462 | 702 |
| 350386 | SCAFFOLD323674_1755 | 703 |
| 350404 | SCAFFOLD36124_6205 | 704 |
| 350425 | SCAFFOLD46484_3384 | 705 |
| 350426 | SCAFFOLD46484_3171 | 706 |
| 350446 | SCAFFOLD52080_7447 | 707 |
| 350451 | SCAFFOLD55461_687 | 708 |
| 350468 | SCAFFOLD61089_3325 | 709 |
| 350535 | SCAFFOLD81100_3471 | 710 |
| 350542 | SCAFFOLD85037_17745 | 711 |
| 350557 | SCAFFOLD90038_35582 | 712 |
| 350617 | SCAFFOLD101114_2006 | 713 |
| 350637 | SCAFFOLD106099_7340 | 714 |
| 350638 | SCAFFOLD106320_2885 | 715 |
| 350677 | SCAFFOLD125539_11512 | 716 |
| 350739 | SCAFFOLD152968_3192 | 717 |
| 350759 | SCAFFOLD160575_768 | 718 |
| 350773 | SCAFFOLD1654_874 | 719 |
| 350818 | SCAFFOLD185976_2662 | 720 |
| 350827 | SCAFFOLD190252_3148 | 721 |
| 350881 | SCAFFOLD215406_5701 | 722 |
| 350943 | SCAFFOLD246578_8558 | 723 |
| 351077 | SCAFFOLD30030_6703 | 724 |
| 351110 | SCAFFOLD316708_43326 | 725 |
| 351212 | SCAFFOLD56714_405 | 726 |
| 351265 | SCAFFOLD80180_17284 | 727 |
| 351278 | SCAFFOLD85279_22726 | 728 |
| 351310 | SCAFFOLD96480_845 | 729 |
| 351316 | IBISS4snp40 | 730 |
| 351373 | SCAFFOLD110929_430 | 731 |
| 351471 | SCAFFOLD165946_4962 | 732 |
| 351503 | SCAFFOLD186010_8404 | 733 |
| 351507 | SCAFFOLD186587_2456 | 734 |
| 351538 | SCAFFOLD20183_16424 | 735 |
| 351548 | SCAFFOLD206776_2497 | 736 |
| 351603 | SCAFFOLD240158_17269 | 737 |
| 351612 | SCAFFOLD245219_2073 | 738 |
| 351675 | SCAFFOLD270264_3928 | 739 |
| 351745 | SCAFFOLD302849_679 | 740 |
| 351762 | SCAFFOLD312013_3173 | 741 |
| 351772 | SCAFFOLD313610_19168 | 742 |
| 351780 | SCAFFOLD316906_13351 | 743 |
| 351815 | SCAFFOLD367946_446 | 744 |
| 351834 | SCAFFOLD46184_583 | 745 |
| 351869 | SCAFFOLD60723_4011 | 746 |
| 351893 | SCAFFOLD75014_22303 | 747 |
| 351977 | SCAFFOLD110052_16832 | 748 |
| 351995 | SCAFFOLD115297_3807 | 749 |
| 351998 | SCAFFOLD11903_9629 | 750 |
| 352051 | SCAFFOLD135046_16431 | 751 |
| 352053 | SCAFFOLD136467_7319 | 752 |
| 352088 | SCAFFOLD161539_2467 | 753 |
| 352103 | SCAFFOLD166319_684 | 754 |
| 352149 | SCAFFOLD195953_12294 | 755 |
| 352177 | SCAFFOLD210729_20981 | 756 |
| 352208 | SCAFFOLD230061_15292 | 757 |
| 352232 | SCAFFOLD245471_32043 | 758 |
| 352323 | SCAFFOLD291797_4042 | 759 |
| 352334 | SCAFFOLD299122_4777 | 760 |
| 352337 | SCAFFOLD301689_4716 | 761 |
| 352342 | SCAFFOLD305434_14153 | 762 |
| 352360 | SCAFFOLD312547_2687 | 763 |
| 352387 | SCAFFOLD37186_1033 | 764 |
| 352407 | SCAFFOLD46184_706 | 765 |
| 352421 | SCAFFOLD55194_29776 | 766 |
| 352426 | SCAFFOLD6048_1026 | 767 |
| 352427 | SCAFFOLD60489_16555 | 768 |
| 352458 | SCAFFOLD75897_13740 | 769 |
| 352524 | SCAFFOLD103209_657 | 770 |
| 352532 | SCAFFOLD110141_21677 | 771 |
| 352560 | SCAFFOLD125693_15530 | 772 |
| 352564 | SCAFFOLD130277_4678 | 773 |
| 352578 | SCAFFOLD136998_2601 | 774 |
| 352587 | SCAFFOLD144700_3565 | 775 |
| 352640 | SCAFFOLD170799_16678 | 776 |
| 352695 | SCAFFOLD200631_515 | 777 |
| 352804 | SCAFFOLD270626_18710 | 778 |
| 352828 | SCAFFOLD285972_2879 | 779 |
| 352888 | SCAFFOLD31598_11367 | 780 |
| 352912 | SCAFFOLD40294_36611 | 781 |
| 352920 | SCAFFOLD46484_3524 | 782 |
| 352928 | SCAFFOLD5178_6226 | 783 |
| 352932 | SCAFFOLD55068_10779 | 784 |
| 352966 | SCAFFOLD76779_3070 | 785 |
| 352986 | SCAFFOLD86113_4825 | 786 |
| 353009 | IBISS4snp454 | 787 |
| 353020 | SCAFFOLD100651_19313 | 788 |
| 353031 | SCAFFOLD105204_16908 | 789 |
| 353070 | SCAFFOLD130352_25837 | 790 |
| 353084 | SCAFFOLD144700_3610 | 791 |
| 353126 | SCAFFOLD169748_4521 | 792 |
| 353131 | SCAFFOLD171003_4691 | 793 |
| 353148 | SCAFFOLD189868_810 | 794 |
| 353187 | SCAFFOLD216959_939 | 795 |
| 353209 | SCAFFOLD240356_5849 | 796 |
| 353211 | SCAFFOLD240435_14381 | 797 |
| 353215 | SCAFFOLD245166_13909 | 798 |
| 353221 | SCAFFOLD246578_8403 | 799 |
| 353222 | SCAFFOLD246578_8740 | 800 |
| 353250 | SCAFFOLD261939_875 | 801 |
| 353319 | SCAFFOLD316906_13568 | 802 |
| 353335 | SCAFFOLD35042_1845 | 803 |
| 353346 | SCAFFOLD40955_7411 | 804 |
| 353416 | IBISS4snp616 | 805 |
| 353421 | IBISS4snp639 | 806 |
| 353479 | SCAFFOLD142117_3231 | 807 |
| 353491 | SCAFFOLD151966_3291 | 808 |
| 353496 | SCAFFOLD155611_5257 | 809 |
| 353521 | SCAFFOLD181031_12304 | 810 |
| 353573 | SCAFFOLD242802_999 | 811 |
| 353575 | SCAFFOLD245284_14755 | 812 |
| 353784 | SCAFFOLD160922_9412 | 813 |
| 353791 | SCAFFOLD174893_838 | 814 |
| 353817 | SCAFFOLD205195_11372 | 815 |
| 353840 | SCAFFOLD245166_13946 | 816 |
| 353863 | SCAFFOLD275520_5504 | 817 |
| 353891 | SCAFFOLD322772_7012 | 818 |
| 353905 | SCAFFOLD40955_6948 | 819 |
| 353918 | SCAFFOLD6048_1174 | 820 |
| 353923 | SCAFFOLD65152_4915 | 821 |
| 353927 | SCAFFOLD70323_17093 | 822 |
| 353929 | SCAFFOLD71223_1675 | 823 |
| 353944 | SCAFFOLD95088_21248 | 824 |
| 354008 | SCAFFOLD190005_17173 | 825 |
| 354028 | SCAFFOLD245012_39265 | 826 |
| 354036 | SCAFFOLD262092_7605 | 827 |
| 354068 | SCAFFOLD322012_24590 | 828 |
| 354108 | SCAFFOLD100305_20665 | 829 |
| 354153 | SCAFFOLD200090_9837 | 830 |
| 354175 | SCAFFOLD262092_7358 | 831 |
| 354213 | SCAFFOLD55125_32713 | 832 |
| 354228 | SCAFFOLD75727_10291 | 833 |
| 354281 | SCAFFOLD19541_879 | 834 |
| 354317 | SCAFFOLD308591_905 | 835 |
| 354346 | SCAFFOLD130137_7497 | 836 |
| 354353 | SCAFFOLD162128_4762 | 837 |
| 354375 | SCAFFOLD26010_1466 | 838 |
| 354395 | SCAFFOLD56872_6521 | 839 |
| 354476 | SCAFFOLD286022_2861 | 840 |
| 354494 | SCAFFOLD125474_7234 | 841 |
| 354536 | SCAFFOLD40159_1874 | 842 |

### EXAMPLE 6

[0097] An analysis of the trait of retail beef yield (RBY) was performed on the same animals as in previous examples and employing the methodology described therein. The analysis performed directly on RBY was compared to an analysis performed on a combination of P8 fat and carcass weight, to determine if there was any commonality in the SNP identified via the two methods.

TABLE 19
Associations between DNA markers and retail beef yield sorted in
decreasing order of statistical significance. Locus and ident are the ParAllele
identifiers of the polymorphisms, inf is whether there are enough genotypes for
each genotype for a proper test, N is the number of genotypes, mean_0 is the mean
total bone out retail beef yield for genotype 0, mean_1 is the mean for genotype 1,
and mean_2 is the mean of genotype 2, SD is the standard deviation, maxd is the
maximum difference between any of the three genotypes, t is the value of the t
test, P is the P value determined from 100,000 permutation tests and log(1/P) is
the P value expressed as a positive integer.

| locus | ident | inf | N | mean_0 | SD | N | mean_1 | SD | N | mean_2 | SD | maxd | t | P | log(1/P) | SEQ ID NO: |
|---|---|---|---|---|---|---|---|---|---|---|---|---|---|---|---|---|
| 6475 | 347657 | Y | 38 | 0.60 | 2.98 | 23 | 0.91 | 2.21 | 11 | −3.49 | 2.01 | 4.397 | 8.435 | 0.000E+00 | 5.000 | 843 |
| 1297 | 345212 | Y | 26 | 1.39 | 2.22 | 33 | 0.20 | 3.04 | 13 | −2.86 | 2.35 | 4.247 | 7.776 | 0.000E+00 | 5.000 | 844 |
| 4931 | 353110 | Y | 12 | −2.68 | 2.52 | 15 | 1.78 | 1.98 | 44 | 0.31 | 2.94 | 4.463 | 7.787 | 0.300E−04 | 4.523 | 845 |
| 518 | 351736 | Y | 14 | −2.78 | 2.71 | 26 | 0.17 | 2.58 | 32 | 1.25 | 2.68 | 4.029 | 6.957 | 0.300E−04 | 4.523 | 846 |
| 7268 | 350185 | Y | 43 | 0.58 | 2.81 | 25 | 0.07 | 2.77 | 4 | −5.29 | 0.82 | 5.866 | 12.540 | 0.500E−04 | 4.301 | 847 |
| 3645 | 353986 | Y | 37 | 0.51 | 3.01 | 29 | −1.08 | 2.78 | 6 | 2.96 | 1.07 | 4.036 | 8.348 | 0.140E−03 | 3.854 | 848 |
| 3517 | 353512 | Y | 26 | −1.80 | 2.87 | 31 | 0.85 | 2.58 | 15 | 1.73 | 2.49 | 3.535 | 6.306 | 0.190E−03 | 3.721 | 849 |
| 1256 | 345055 | Y | 0 | 0.00 | 0.00 | 3 | −4.41 | 0.20 | 69 | 0.27 | 2.92 | 4.675 | 17.850 | 0.220E−03 | 3.658 | 850 |
| 7756 | 351887 | Y | 42 | 0.53 | 2.96 | 14 | 1.42 | 2.48 | 16 | −2.30 | 2.32 | 3.718 | 6.490 | 0.250E−03 | 3.602 | 851 |
| 6849 | 348851 | Y | 36 | 1.06 | 2.85 | 25 | −0.02 | 2.57 | 11 | −2.93 | 2.56 | 3.992 | 6.637 | 0.250E−03 | 3.602 | 852 |
| 3237 | 352465 | Y | 0 | 0.00 | 0.00 | 3 | −4.41 | 0.20 | 69 | 0.27 | 2.92 | 4.675 | 17.850 | 0.250E−03 | 3.602 | 853 |
| 8022 | 352877 | Y | 69 | 0.27 | 2.92 | 3 | −4.41 | 0.20 | 0 | 0.00 | 0.00 | 4.675 | 17.850 | 0.260E−03 | 3.585 | 854 |
| 690 | 353811 | Y | 16 | −2.40 | 2.67 | 26 | 0.45 | 2.89 | 29 | 1.03 | 2.64 | 3.433 | 5.926 | 0.260E−03 | 3.585 | 855 |
| 8061 | 353017 | Y | 17 | −2.36 | 2.69 | 28 | 0.98 | 2.87 | 27 | 0.67 | 2.56 | 3.342 | 5.892 | 0.410E−03 | 3.387 | 856 |
| 1495 | 346019 | Y | 56 | 0.58 | 2.67 | 13 | −2.81 | 2.70 | 0 | 0.00 | 0.00 | 3.386 | 5.772 | 0.510E−03 | 3.292 | 857 |
| 7113 | 349728 | Y | 12 | −2.60 | 2.70 | 25 | 0.00 | 2.57 | 34 | 1.15 | 2.88 | 3.745 | 6.137 | 0.540E−03 | 3.268 | 858 |
| 7855 | 352224 | Y | 26 | −1.17 | 2.73 | 36 | 0.89 | 2.92 | 6 | 2.42 | 1.01 | 3.590 | 7.464 | 0.550E−03 | 3.260 | 859 |
| 1243 | 344998 | Y | 13 | −2.39 | 2.42 | 29 | 0.19 | 3.04 | 28 | 1.01 | 2.77 | 3.394 | 5.758 | 0.660E−03 | 3.180 | 860 |
| 2743 | 350667 | Y | 15 | 2.01 | 2.80 | 36 | 0.05 | 2.89 | 19 | −1.36 | 2.65 | 3.370 | 5.497 | 0.103E−02 | 2.987 | 861 |
| 621 | 353002 | Y | 35 | −0.08 | 2.90 | 29 | −0.59 | 2.89 | 8 | 3.16 | 2.18 | 3.755 | 6.133 | 0.150E−02 | 2.824 | 862 |
| 5844 | 345544 | Y | 12 | 2.52 | 2.55 | 36 | −0.22 | 3.09 | 24 | −0.71 | 2.53 | 3.229 | 5.399 | 0.216E−02 | 2.666 | 863 |

TABLE 20
Associations between DNA markers and retail beef yield sorted in decreasing order of
statistical significance. Locus is the ParAllele identifiers of the polymorphisms, N is
the number of genotypes, mean_0 is the mean retail beef yield for genotype 0, mean_1 is the
mean for genotype 1, and mean_2 is the mean of genotype 2, SD is the standard deviation, a
is the additive effect, k is the dominance effect, alpha is the average effect of allele
substitutions, tmax is the value of the t test, and log(1/P) is the P value determined from
100,000 permutation tests expressed as a positive integer. A minus value for a means the
mean of genotype 0 is lower than the mean of genotype 2, and a minus value for alpha means
that selecting for allele 0 will reduce the average values of retail beef yield in the
population.

| Locus | mean | SD | mean | SD | mean | SD | N | Freq | a | k | alpha | tmax | log(1/P) |
|---|---|---|---|---|---|---|---|---|---|---|---|---|---|
| 347657 | 0.60 | 2.98 | 0.91 | 2.21 | −3.49 | 2.01 | 72 | 0.69 | 2.04 | 1.15 | 2.93 | 8.435 | 5.0000 |
| 345212 | 1.39 | 2.22 | 0.20 | 3.04 | −2.86 | 2.35 | 72 | 0.59 | 2.12 | 0.44 | 2.29 | 7.776 | 5.0000 |
| 353110 | −2.68 | 2.52 | 1.78 | 1.98 | 0.31 | 2.94 | 71 | 0.27 | −1.50 | −1.98 | −2.83 | 7.787 | 4.5230 |
| 351736 | −2.78 | 2.71 | 0.17 | 2.58 | 1.25 | 2.68 | 72 | 0.38 | −2.01 | −0.46 | −2.25 | 6.957 | 4.5230 |
| 350185 | 0.58 | 2.81 | 0.07 | 2.77 | −5.29 | 0.82 | 72 | 0.77 | 2.94 | 0.83 | 4.25 | 12.540 | 4.3010 |
| 353986 | 0.51 | 3.01 | −1.08 | 2.78 | 2.96 | 1.07 | 72 | 0.72 | −1.23 | 2.30 | −2.44 | 8.348 | 3.8540 |
| 353512 | −1.80 | 2.87 | 0.85 | 2.58 | 1.73 | 2.49 | 72 | 0.58 | −1.77 | −0.50 | −1.63 | 6.306 | 3.7210 |
| 345055 | 0.00 | 0.00 | −4.41 | 0.20 | 0.27 | 2.92 | 72 | 0.02 | −0.14 | 33.67 | 4.22 | 17.850 | 3.6580 |
| 351887 | 0.53 | 2.96 | 1.42 | 2.48 | −2.30 | 2.32 | 72 | 0.68 | 1.42 | 1.63 | 2.25 | 6.490 | 3.6020 |
| 348851 | 1.06 | 2.85 | −0.02 | 2.57 | −2.93 | 2.56 | 72 | 0.67 | 2.00 | 0.46 | 2.31 | 6.637 | 3.6020 |
| 352465 | 0.00 | 0.00 | −4.41 | 0.20 | 0.27 | 2.92 | 72 | 0.02 | −0.14 | 33.67 | 4.22 | 17.850 | 3.6020 |
| 352877 | 0.27 | 2.92 | −4.41 | 0.20 | 0.00 | 0.00 | 72 | 0.98 | 0.14 | −33.67 | −4.22 | 17.850 | 3.5850 |
| 353811 | −2.40 | 2.67 | 0.45 | 2.89 | 1.03 | 2.64 | 71 | 0.41 | −1.71 | −0.66 | −1.92 | 5.926 | 3.5850 |
| 353017 | −2.36 | 2.69 | 0.98 | 2.87 | 0.67 | 2.56 | 72 | 0.43 | −1.51 | −1.20 | −1.77 | 5.892 | 3.3870 |
| 343676 | 2.65 | 0.75 | 0.97 | 2.51 | −1.07 | 3.19 | 71 | 0.30 | 1.86 | 0.10 | 1.79 | 8.286 | 3.3010 |
| 346019 | 0.58 | 2.67 | −2.81 | 2.70 | 0.00 | 0.00 | 69 | 0.91 | 0.29 | −10.69 | −2.23 | 5.772 | 3.2920 |
| 350492 | 0.58 | 2.95 | 1.14 | 2.59 | −2.54 | 2.29 | 70 | 0.69 | 1.56 | 1.36 | 2.38 | 6.259 | 3.2840 |
| 349728 | −2.60 | 2.70 | 0.00 | 2.57 | 1.15 | 2.88 | 71 | 0.35 | −1.88 | −0.39 | −2.10 | 6.137 | 3.2680 |
| 352224 | −1.17 | 2.73 | 0.89 | 2.92 | 2.42 | 1.01 | 68 | 0.65 | −1.79 | −0.15 | −1.72 | 7.464 | 3.2600 |
| 347013 | −2.51 | 2.90 | 1.43 | 2.82 | 0.07 | 2.65 | 72 | 0.33 | −1.29 | −2.05 | −2.21 | 6.147 | 3.2220 |
| 344998 | −2.39 | 2.42 | 0.19 | 3.04 | 1.01 | 2.77 | 70 | 0.39 | −1.70 | −0.52 | −1.89 | 5.758 | 3.1800 |
| 350295 | −1.09 | 2.86 | 0.49 | 3.11 | 2.11 | 1.52 | 71 | 0.65 | −1.60 | 0.01 | −1.61 | 6.131 | 3.0000 |
| 351886 | 0.62 | 2.84 | 1.33 | 2.82 | −2.54 | 2.29 | 71 | 0.73 | 1.58 | 1.45 | 2.61 | 5.925 | 2.9960 |
| 354319 | −1.55 | 2.54 | 1.42 | 3.16 | 0.67 | 2.31 | 72 | 0.57 | −1.11 | −1.68 | −0.85 | 5.384 | 2.9910 |
| 350667 | 2.01 | 2.80 | 0.05 | 2.89 | −1.36 | 2.65 | 70 | 0.47 | 1.69 | −0.16 | 1.70 | 5.497 | 2.9870 |
| 343932 | −2.19 | 2.38 | 0.76 | 3.52 | 1.02 | 2.24 | 70 | 0.42 | −1.60 | −0.84 | −1.82 | 5.478 | 2.9630 |
| 344277 | 1.65 | 2.50 | 0.46 | 3.11 | −1.60 | 2.38 | 72 | 0.44 | 1.62 | 0.27 | 1.58 | 5.613 | 2.9550 |
| 343738 | 0.74 | 2.80 | −0.70 | 2.96 | −4.10 | 1.14 | 72 | 0.81 | 2.42 | 0.40 | 3.02 | 8.710 | 2.9510 |
| 343686 | 0.54 | 3.06 | 1.37 | 2.58 | −2.22 | 2.47 | 65 | 0.68 | 1.38 | 1.60 | 2.20 | 5.689 | 2.9240 |
| 348679 | −2.20 | 2.17 | 0.07 | 2.82 | 1.18 | 3.21 | 70 | 0.42 | −1.69 | −0.34 | −1.78 | 5.659 | 2.9100 |
| 351219 | 1.51 | 2.84 | −0.06 | 2.48 | −1.41 | 2.76 | 70 | 0.51 | 1.46 | −0.08 | 1.46 | 5.227 | 2.9070 |
| 353161 | 1.03 | 2.64 | 0.45 | 2.95 | −1.99 | 2.78 | 72 | 0.58 | 1.51 | 0.62 | 1.65 | 5.186 | 2.8390 |
| 350570 | −1.01 | 2.92 | 0.14 | 2.82 | 2.25 | 2.63 | 69 | 0.61 | −1.63 | 0.29 | −1.73 | 5.404 | 2.8270 |
| 353002 | −0.08 | 2.90 | −0.59 | 2.89 | 3.16 | 2.18 | 72 | 0.69 | −1.62 | 1.31 | −2.42 | 6.133 | 2.8240 |
| 343925 | 0.36 | 2.30 | −1.44 | 2.97 | 1.81 | 3.27 | 70 | 0.57 | −0.73 | 3.48 | −1.09 | 5.263 | 2.8210 |
| 351957 | 1.47 | 2.65 | 0.08 | 3.20 | −1.57 | 2.26 | 71 | 0.53 | 1.52 | 0.09 | 1.53 | 5.369 | 2.8100 |
| 345649 | 0.31 | 2.82 | 1.01 | 2.87 | −2.56 | 2.67 | 72 | 0.70 | 1.44 | 1.49 | 2.29 | 5.554 | 2.8010 |
| 348825 | 0.00 | 0.00 | 1.62 | 2.89 | −0.80 | 2.79 | 71 | 0.18 | 0.40 | 5.05 | −0.88 | 4.745 | 2.7990 |
| 345814 | 2.33 | 2.39 | −0.31 | 2.71 | −0.68 | 3.05 | 72 | 0.38 | 1.51 | −0.75 | 1.77 | 5.311 | 2.7540 |
| 346220 | 0.00 | 0.00 | 2.31 | 0.99 | −0.30 | 2.93 | 68 | 0.06 | 0.15 | 16.40 | −2.02 | 6.682 | 2.7120 |
| 353802 | 0.36 | 2.94 | −1.27 | 3.10 | 2.06 | 1.53 | 72 | 0.74 | −0.85 | 2.92 | −2.06 | 5.928 | 2.6970 |
| 345183 | 0.62 | 2.84 | 1.02 | 2.90 | −2.54 | 2.29 | 72 | 0.72 | 1.58 | 1.25 | 2.46 | 5.504 | 2.6970 |
| 347846 | 1.55 | 2.79 | −0.04 | 2.86 | −1.28 | 2.46 | 70 | 0.55 | 1.42 | −0.12 | 1.40 | 5.052 | 2.6700 |
| 349243 | −2.03 | 2.68 | −0.09 | 3.10 | 1.19 | 2.56 | 72 | 0.39 | −1.61 | −0.20 | −1.68 | 5.335 | 2.6680 |
| 348659 | −1.47 | 2.60 | 0.58 | 3.48 | 1.25 | 1.81 | 72 | 0.53 | −1.36 | −0.51 | −1.31 | 5.056 | 2.6660 |
| 345544 | 2.52 | 2.55 | −0.22 | 3.09 | −0.71 | 2.53 | 72 | 0.42 | 1.61 | −0.70 | 1.80 | 5.399 | 2.6660 |
| 352969 | −1.65 | 3.26 | 0.18 | 2.84 | 1.35 | 2.36 | 72 | 0.47 | −1.50 | −0.22 | −1.52 | 5.020 | 2.6640 |
| 352779 | 0.67 | 2.88 | 0.27 | 2.62 | −3.40 | 2.78 | 72 | 0.71 | 2.04 | 0.80 | 2.72 | 5.866 | 2.6400 |
| 349785 | 0.01 | 2.70 | −1.23 | 3.08 | 1.60 | 2.55 | 71 | 0.50 | −0.80 | 2.56 | −0.80 | 4.974 | 2.6250 |
| 342775 | 1.67 | 1.64 | −1.10 | 2.42 | 0.15 | 3.68 | 69 | 0.38 | 0.76 | −2.64 | 1.23 | 5.142 | 2.6220 |
| 352028 | −3.80 | 1.96 | 0.21 | 1.86 | 0.44 | 3.31 | 72 | 0.23 | −2.12 | −0.89 | −3.14 | 6.788 | 2.6180 |
| 352133 | −0.01 | 3.19 | 1.17 | 2.45 | −2.32 | 2.37 | 71 | 0.71 | 1.16 | 2.02 | 2.14 | 5.665 | 2.6020 |
| 348096 | 0.79 | 2.91 | 0.36 | 2.63 | −2.36 | 2.60 | 72 | 0.69 | 1.57 | 0.73 | 2.00 | 5.201 | 2.6020 |
| 354493 | 1.44 | 2.80 | −1.74 | 1.63 | 0.53 | 2.91 | 57 | 0.35 | 0.45 | −5.99 | 1.27 | 5.349 | 2.5870 |
| 348824 | −0.72 | 2.77 | 1.73 | 2.95 | 0.00 | 0.00 | 70 | 0.84 | −0.36 | −5.81 | 1.04 | 4.570 | 2.5780 |
| 348555 | 4.90 | 2.48 | −0.23 | 3.14 | −0.37 | 2.65 | 68 | 0.21 | 2.64 | −0.95 | 4.07 | 6.612 | 2.5470 |
| 349040 | 0.78 | 2.92 | −1.44 | 2.68 | 0.00 | 0.00 | 69 | 0.80 | 0.39 | −4.69 | −0.72 | 4.410 | 2.5330 |
| 349163 | 2.41 | 0.95 | 0.34 | 3.85 | −0.71 | 2.53 | 70 | 0.29 | 1.56 | −0.33 | 1.78 | 5.566 | 2.5320 |
| 343107 | 0.61 | 2.75 | 0.74 | 3.03 | −2.18 | 2.52 | 72 | 0.61 | 1.40 | 1.09 | 1.73 | 5.005 | 2.5270 |
| 353686 | −0.36 | 2.42 | 3.58 | 2.63 | −0.38 | 2.70 | 63 | 0.23 | 0.01 | 395.00 | −2.12 | 5.552 | 2.5260 |
| 346831 | −1.02 | 2.86 | −0.26 | 2.93 | 1.76 | 2.62 | 72 | 0.53 | −1.39 | 0.45 | −1.43 | 4.847 | 2.5170 |
| 344847 | 2.42 | 1.63 | −2.11 | 2.28 | 0.38 | 3.00 | 72 | 0.14 | 1.02 | −3.44 | 3.56 | 7.008 | 2.5030 |
| 344018 | −2.65 | 2.50 | −0.55 | 3.35 | 1.21 | 2.22 | 70 | 0.27 | −1.93 | −0.09 | −2.01 | 5.627 | 2.4950 |
| 348894 | 0.17 | 2.53 | −1.41 | 3.41 | 1.62 | 2.62 | 72 | 0.60 | −0.73 | 3.18 | −1.21 | 4.942 | 2.4840 |
| 351901 | 1.26 | 2.38 | 0.18 | 2.84 | −1.65 | 3.26 | 71 | 0.52 | 1.46 | 0.26 | 1.47 | 4.831 | 2.4740 |
| 351684 | −0.07 | 3.03 | 2.94 | 0.26 | 0.00 | 0.00 | 71 | 0.98 | −0.04 | −85.00 | 2.81 | 10.779 | 2.4660 |
| 348976 | −1.19 | 2.22 | 0.19 | 3.31 | 1.66 | 2.58 | 72 | 0.55 | −1.42 | 0.03 | −1.43 | 4.978 | 2.4650 |
| 349018 | 1.84 | 2.74 | −0.58 | 3.33 | −0.85 | 2.11 | 72 | 0.49 | 1.34 | −0.80 | 1.36 | 4.804 | 2.4620 |
| 350070 | −1.10 | 2.07 | −2.32 | 2.60 | 1.22 | 2.72 | 70 | 0.23 | −1.16 | 2.05 | 0.13 | 5.716 | 2.4530 |
| 352396 | 2.41 | 2.18 | 0.02 | 2.82 | −0.59 | 3.06 | 72 | 0.32 | 1.50 | −0.59 | 1.82 | 5.145 | 2.4450 |
| 347844 | 0.70 | 2.92 | −1.65 | 2.67 | 0.00 | 0.00 | 72 | 0.85 | 0.35 | −5.71 | −1.04 | 4.429 | 2.4320 |
| 346426 | −0.32 | 2.93 | −0.58 | 2.72 | 2.84 | 2.65 | 71 | 0.69 | −1.58 | 1.16 | −2.28 | 5.314 | 2.4290 |
| 346881 | 2.41 | 2.18 | 0.02 | 2.82 | −0.59 | 3.06 | 72 | 0.32 | 1.50 | −0.59 | 1.82 | 5.145 | 2.4290 |
| 351830 | −0.59 | 3.06 | 0.02 | 2.82 | 2.41 | 2.18 | 72 | 0.68 | −1.50 | 0.59 | −1.82 | 5.145 | 2.4150 |
| 348549 | −1.22 | 2.78 | 0.10 | 2.92 | 1.97 | 2.90 | 70 | 0.56 | −1.59 | 0.17 | −1.63 | 4.957 | 2.4100 |
| 351744 | 0.00 | 0.00 | −2.03 | 2.52 | 0.57 | 2.97 | 72 | 0.12 | −0.28 | 8.12 | 1.48 | 4.597 | 2.4060 |
| 345624 | −2.57 | 1.89 | −0.03 | 3.04 | 0.66 | 2.93 | 72 | 0.28 | −1.61 | −0.57 | −2.03 | 5.477 | 2.4060 |
| 352026 | −1.20 | 2.14 | −0.01 | 3.40 | 1.43 | 2.46 | 72 | 0.49 | −1.31 | 0.10 | −1.31 | 4.802 | 2.4010 |
| 342505 | −0.60 | 2.98 | 1.56 | 2.64 | 0.00 | 0.00 | 72 | 0.83 | −0.30 | −6.20 | 0.94 | 4.336 | 2.3970 |
| 344701 | −0.06 | 3.00 | 0.00 | 0.00 | 3.17 | 0.43 | 72 | 0.96 | −1.61 | 0.96 | −3.04 | 10.401 | 2.3890 |
| 353130 | 0.27 | 2.56 | −1.37 | 3.26 | 1.33 | 2.63 | 72 | 0.50 | −0.53 | 4.09 | −0.53 | 4.672 | 2.3890 |
| 348115 | −1.20 | 2.14 | −0.01 | 3.40 | 1.43 | 2.46 | 72 | 0.49 | −1.31 | 0.10 | −1.31 | 4.802 | 2.3840 |
| 346942 | −1.22 | 2.99 | −0.26 | 2.61 | 1.49 | 2.83 | 71 | 0.49 | −1.35 | 0.29 | −1.35 | 4.677 | 2.3560 |
| 354094 | 0.19 | 3.08 | −1.30 | 2.99 | 2.19 | 1.31 | 69 | 0.81 | −1.00 | 2.49 | −2.55 | 5.732 | 2.3560 |
| 344838 | 1.36 | 2.34 | 0.29 | 2.93 | −1.59 | 3.14 | 72 | 0.49 | 1.48 | 0.27 | 1.47 | 4.880 | 2.3560 |
| 344830 | 1.37 | 2.51 | −1.55 | 3.08 | −0.20 | 2.82 | 65 | 0.57 | 0.79 | −2.72 | 0.49 | 4.725 | 2.3330 |
| 342541 | 1.45 | 1.70 | 0.47 | 3.28 | −1.15 | 2.83 | 70 | 0.41 | 1.30 | 0.25 | 1.24 | 4.775 | 2.3330 |
| 343029 | 0.10 | 2.48 | 1.75 | 3.02 | −1.07 | 3.05 | 72 | 0.50 | 0.59 | 3.82 | 0.59 | 4.682 | 2.3280 |
| 352311 | 0.00 | 0.00 | 3.32 | 0.40 | 0.14 | 3.08 | 63 | 0.02 | −0.07 | −46.43 | −3.17 | 9.781 | 2.3210 |
| 353532 | −1.70 | 2.97 | −0.06 | 2.93 | 1.16 | 2.66 | 66 | 0.45 | −1.43 | −0.15 | −1.45 | 4.638 | 2.3070 |
| 344436 | −1.46 | 2.68 | 0.82 | 2.91 | 1.31 | 2.77 | 72 | 0.58 | −1.39 | −0.65 | −1.25 | 4.721 | 2.2970 |
| 351850 | 0.50 | 3.03 | 0.00 | 0.00 | −1.62 | 2.24 | 66 | 0.74 | 1.06 | 0.53 | 1.33 | 4.300 | 2.2950 |
| 346624 | 0.00 | 0.00 | 2.26 | 1.98 | −0.62 | 2.98 | 54 | 0.09 | 0.31 | 8.29 | −1.78 | 4.904 | 2.2840 |
| 352566 | 0.07 | 3.09 | −1.07 | 2.99 | 2.93 | 1.87 | 66 | 0.82 | −1.43 | 1.80 | −3.07 | 5.610 | 2.2790 |
| 344973 | 0.59 | 2.55 | −1.58 | 2.87 | 0.00 | 0.00 | 64 | 0.84 | 0.29 | −6.36 | −0.96 | 4.168 | 2.2720 |
| 350461 | −1.12 | 3.08 | −0.06 | 2.48 | 1.51 | 2.84 | 71 | 0.50 | −1.31 | 0.19 | −1.31 | 4.552 | 2.2650 |
| 344191 | 0.74 | 3.16 | −0.43 | 2.53 | −2.43 | 1.84 | 72 | 0.75 | 1.58 | 0.26 | 1.79 | 5.469 | 2.2640 |
| 344183 | 0.00 | 0.00 | 2.03 | 1.50 | −0.14 | 3.10 | 72 | 0.09 | 0.07 | 30.00 | −1.65 | 4.810 | 2.2600 |
| 344536 | 1.40 | 2.70 | −1.25 | 2.97 | 0.29 | 2.75 | 72 | 0.54 | 0.55 | −3.77 | 0.38 | 4.590 | 2.2540 |
| 344864 | −0.20 | 2.39 | 1.34 | 3.28 | −1.65 | 2.92 | 72 | 0.62 | 0.72 | 3.12 | 1.29 | 4.719 | 2.2490 |
| 350429 | 0.97 | 3.08 | −0.45 | 2.74 | −2.36 | 2.03 | 72 | 0.70 | 1.67 | 0.15 | 1.76 | 5.476 | 2.2370 |
| 346717 | 0.00 | 0.00 | −1.25 | 2.99 | 0.88 | 2.69 | 72 | 0.19 | −0.44 | 3.84 | 0.62 | 4.089 | 2.2360 |
| 350280 | 0.09 | 2.79 | 1.02 | 2.91 | −2.09 | 2.92 | 72 | 0.65 | 1.09 | 1.85 | 1.68 | 4.799 | 2.2350 |
| 348797 | 1.78 | 2.38 | −0.05 | 2.61 | −0.91 | 3.29 | 70 | 0.44 | 1.34 | −0.36 | 1.40 | 4.630 | 2.2350 |
| 346006 | 0.00 | 0.00 | 3.20 | 0.55 | −0.06 | 3.02 | 71 | 0.02 | 0.03 | 107.67 | −3.06 | 9.558 | 2.2270 |
| 354108 | 0.00 | 0.00 | 3.20 | 0.55 | −0.06 | 3.00 | 72 | 0.02 | 0.03 | 107.67 | −3.07 | 9.632 | 2.2260 |
| 346122 | −0.01 | 2.99 | 3.20 | 0.55 | 0.00 | 0.00 | 70 | 0.98 | −0.01 | −641.00 | 3.06 | 9.410 | 2.2210 |
| 351288 | 1.26 | 2.95 | 0.57 | 2.84 | −1.49 | 2.75 | 71 | 0.46 | 1.38 | 0.50 | 1.32 | 4.580 | 2.2180 |
| 344010 | 0.29 | 2.93 | −1.77 | 2.67 | 3.06 | 2.06 | 72 | 0.85 | −1.39 | 2.49 | −3.83 | 6.295 | 2.2180 |
| 353682 | −1.14 | 2.22 | 0.28 | 3.71 | 1.31 | 1.77 | 71 | 0.56 | −1.23 | −0.16 | −1.20 | 4.615 | 2.2160 |
| 349024 | 0.94 | 2.78 | −0.09 | 3.07 | −1.97 | 2.61 | 72 | 0.66 | 1.46 | 0.29 | 1.59 | 4.715 | 2.2150 |
| 352077 | 3.13 | 1.75 | 0.26 | 1.57 | −0.20 | 3.24 | 71 | 0.17 | 1.67 | −0.72 | 2.46 | 5.802 | 2.2080 |
| 351296 | 0.64 | 2.86 | −2.04 | 3.04 | 0.00 | 0.00 | 70 | 0.86 | 0.32 | −7.37 | −1.40 | 4.302 | 2.2080 |
| 345504 | −1.35 | 2.96 | 0.37 | 2.97 | 1.44 | 2.60 | 70 | 0.54 | −1.40 | −0.23 | −1.37 | 4.626 | 2.2010 |
| 351514 | −2.71 | 3.19 | 0.66 | 2.64 | 0.45 | 2.84 | 71 | 0.36 | −1.58 | −1.13 | −2.08 | 4.882 | 2.2000 |
| 349752 | 0.70 | 2.49 | −0.37 | 3.12 | −3.43 | 2.57 | 66 | 0.72 | 2.06 | 0.48 | 2.50 | 5.532 | 2.2000 |
| 349919 | −0.06 | 3.00 | 3.20 | 0.55 | 0.00 | 0.00 | 72 | 0.98 | −0.03 | −107.67 | 3.07 | 9.632 | 2.1990 |
| 351525 | 2.93 | 1.79 | −0.86 | 3.19 | 0.61 | 2.73 | 66 | 0.32 | 1.16 | −2.27 | 2.12 | 5.956 | 2.1910 |
| 346742 | −0.75 | 3.20 | 0.14 | 2.88 | 1.97 | 1.83 | 70 | 0.61 | −1.36 | 0.35 | −1.46 | 4.840 | 2.1860 |
| 345736 | 1.65 | 2.05 | −0.03 | 3.37 | −0.87 | 2.65 | 72 | 0.45 | 1.26 | −0.33 | 1.30 | 4.571 | 2.1820 |
| 354432 | 0.87 | 2.83 | 0.03 | 2.90 | −2.08 | 2.75 | 72 | 0.67 | 1.48 | 0.43 | 1.70 | 4.693 | 2.1760 |
| 344131 | 1.02 | 2.32 | −2.40 | 2.29 | 0.10 | 3.19 | 70 | 0.42 | 0.46 | −6.43 | 0.93 | 5.336 | 2.1720 |
| 350495 | −0.48 | 2.78 | 0.09 | 3.34 | 2.87 | 1.70 | 69 | 0.72 | −1.68 | 0.66 | −2.17 | 5.486 | 2.1690 |
| 348287 | 0.28 | 2.90 | −4.62 | 1.15 | 0.00 | 0.00 | 72 | 0.98 | 0.14 | −34.00 | −4.42 | 9.212 | 2.1620 |
| 349907 | −1.97 | 2.61 | 0.00 | 3.11 | 1.00 | 2.77 | 70 | 0.33 | −1.48 | −0.33 | −1.65 | 4.644 | 2.1610 |
| 353531 | −1.64 | 2.70 | 0.45 | 2.95 | 1.03 | 2.64 | 70 | 0.41 | −1.33 | −0.57 | −1.48 | 4.529 | 2.1600 |
| 354336 | 0.53 | 3.10 | −1.40 | 2.30 | 3.71 | 1.65 | 69 | 0.81 | −1.59 | 2.21 | −3.78 | 7.550 | 2.1580 |
| 346884 | −1.93 | 2.47 | 0.52 | 2.77 | 0.71 | 3.15 | 71 | 0.42 | −1.32 | −0.86 | −1.51 | 4.537 | 2.1560 |
| 349636 | −1.41 | 2.86 | 1.53 | 1.94 | −0.09 | 3.20 | 72 | 0.28 | −0.66 | −3.45 | −1.64 | 4.755 | 2.1530 |
| 347279 | −0.09 | 3.11 | 0.82 | 2.83 | −2.35 | 1.15 | 70 | 0.79 | 1.13 | 1.81 | 2.30 | 5.852 | 2.1520 |
| 348339 | 0.84 | 2.73 | 0.07 | 3.23 | −2.21 | 2.52 | 72 | 0.69 | 1.52 | 0.50 | 1.82 | 4.667 | 2.1400 |
| 353853 | 1.70 | 2.63 | −0.50 | 2.84 | −1.01 | 3.03 | 71 | 0.55 | 1.35 | −0.62 | 1.27 | 4.496 | 2.1400 |
| 346382 | −3.30 | 2.20 | −0.21 | 2.88 | 0.59 | 2.91 | 71 | 0.18 | −1.94 | −0.59 | −2.67 | 5.376 | 2.1310 |
| 352445 | −2.04 | 2.86 | 0.39 | 2.73 | 0.82 | 3.00 | 72 | 0.42 | −1.43 | −0.70 | −1.60 | 4.596 | 2.1290 |
| 345165 | 0.84 | 2.93 | 0.14 | 2.99 | −2.06 | 2.61 | 70 | 0.61 | 1.45 | 0.52 | 1.61 | 4.642 | 2.1270 |
| 345555 | 0.05 | 2.65 | −0.65 | 3.34 | 2.40 | 2.21 | 72 | 0.68 | −1.18 | 1.60 | −1.85 | 4.941 | 2.1270 |
| 350397 | −0.03 | 2.87 | 2.43 | 2.92 | −0.75 | 2.73 | 69 | 0.62 | 0.36 | 7.83 | 1.01 | 4.730 | 2.1260 |
| 348558 | −2.50 | 2.41 | −0.29 | 2.91 | 0.85 | 2.96 | 70 | 0.28 | −1.68 | −0.32 | −1.91 | 5.047 | 2.1240 |
| 354061 | −0.69 | 3.25 | 0.02 | 3.03 | 1.87 | 1.70 | 71 | 0.58 | −1.28 | 0.45 | −1.38 | 4.610 | 2.1210 |
| 351203 | 0.69 | 2.94 | −1.45 | 2.38 | 0.00 | 0.00 | 70 | 0.88 | 0.34 | −5.20 | −1.01 | 4.121 | 2.1120 |
| 348607 | 2.82 | 2.44 | 0.52 | 2.84 | −0.75 | 2.94 | 71 | 0.30 | 1.78 | −0.29 | 2.00 | 5.261 | 2.1120 |
| 352618 | 0.97 | 3.02 | 0.66 | 2.77 | −1.68 | 2.83 | 68 | 0.52 | 1.32 | 0.77 | 1.37 | 4.395 | 2.1120 |
| 353471 | −0.23 | 3.09 | 1.79 | 1.75 | 0.00 | 0.00 | 72 | 0.92 | −0.12 | −16.57 | 1.50 | 4.343 | 2.1080 |
| 347554 | −0.14 | 2.77 | −0.90 | 3.34 | 1.74 | 2.07 | 65 | 0.55 | −0.94 | 1.81 | −1.12 | 4.508 | 2.1080 |
| 348079 | 0.25 | 2.81 | 0.57 | 3.01 | −3.16 | 2.65 | 67 | 0.77 | 1.71 | 1.19 | 2.79 | 5.023 | 2.1050 |
| 348387 | 0.00 | 0.00 | −1.11 | 3.35 | 0.95 | 2.48 | 72 | 0.22 | −0.47 | 3.34 | 0.43 | 3.906 | 2.1020 |
| 351975 | −1.95 | 2.65 | 0.70 | 2.97 | 0.60 | 2.82 | 72 | 0.42 | −1.27 | −1.08 | −1.49 | 4.496 | 2.1010 |
| 352556 | −1.86 | 2.21 | 0.00 | 0.00 | 0.71 | 3.11 | 57 | 0.19 | −1.29 | −0.45 | −1.64 | 4.320 | 2.1000 |
| 348168 | −0.51 | 2.99 | −0.23 | 2.68 | 2.57 | 2.87 | 72 | 0.65 | −1.54 | 0.82 | −1.91 | 4.715 | 2.0990 |
| 349641 | 0.00 | 0.00 | 1.85 | 0.90 | −0.09 | 3.08 | 72 | 0.04 | 0.04 | 42.11 | −1.69 | 5.184 | 2.0940 |
| 354141 | 2.23 | 3.18 | 0.59 | 2.55 | −1.14 | 2.93 | 72 | 0.35 | 1.69 | 0.03 | 1.67 | 4.776 | 2.0890 |
| 346864 | −1.03 | 2.44 | 0.49 | 3.39 | 1.61 | 1.96 | 72 | 0.62 | −1.32 | −0.15 | −1.27 | 4.732 | 2.0750 |
| 350780 | 2.23 | 3.18 | 0.59 | 2.55 | −1.14 | 2.93 | 72 | 0.35 | 1.69 | 0.03 | 1.67 | 4.776 | 2.0700 |
| 353286 | −2.72 | 2.74 | 0.29 | 3.31 | 0.62 | 2.46 | 72 | 0.32 | −1.67 | −0.80 | −2.15 | 4.894 | 2.0690 |
| 348641 | 0.00 | 0.00 | −2.21 | 2.70 | 0.50 | 2.92 | 72 | 0.09 | −0.25 | 9.84 | 1.77 | 4.266 | 2.0680 |
| 349178 | −0.34 | 3.04 | −0.24 | 2.67 | 2.74 | 2.38 | 72 | 0.74 | −1.54 | 0.94 | −2.22 | 4.867 | 2.0670 |
| 348452 | 1.06 | 2.75 | −0.41 | 3.01 | −1.89 | 2.76 | 72 | 0.67 | 1.48 | 0.00 | 1.48 | 4.616 | 2.0660 |
| 348122 | 1.86 | 3.30 | 0.29 | 2.65 | −0.98 | 2.82 | 69 | 0.40 | 1.42 | −0.11 | 1.45 | 4.392 | 2.0610 |
| 350668 | −1.22 | 2.66 | 0.14 | 2.90 | 1.65 | 3.12 | 72 | 0.53 | −1.44 | 0.05 | −1.44 | 4.484 | 2.0540 |
| 353733 | 0.87 | 2.62 | −0.57 | 3.52 | −2.29 | 2.36 | 70 | 0.71 | 1.58 | 0.09 | 1.64 | 4.618 | 2.0520 |
| 354047 | −1.77 | 3.36 | 1.08 | 2.69 | −0.03 | 2.71 | 71 | 0.44 | −0.87 | −2.28 | −1.09 | 4.426 | 2.0520 |
| 351572 | 0.81 | 2.79 | 0.46 | 2.97 | −1.92 | 2.66 | 71 | 0.62 | 1.36 | 0.74 | 1.61 | 4.510 | 2.0510 |
| 354312 | 0.52 | 2.81 | −2.39 | 3.00 | 0.00 | 0.00 | 72 | 0.92 | 0.26 | −10.19 | −1.99 | 4.216 | 2.0510 |
| 348605 | −0.84 | 2.95 | 0.13 | 3.29 | 1.60 | 1.81 | 72 | 0.58 | −1.22 | 0.20 | −1.26 | 4.447 | 2.0510 |
| 345669 | −2.47 | 1.84 | −3.67 | 2.14 | 0.67 | 2.77 | 72 | 0.10 | −1.57 | 1.76 | 0.62 | 5.884 | 2.0510 |
| 343565 | 2.40 | 3.41 | 0.49 | 2.37 | −1.11 | 3.04 | 71 | 0.37 | 1.75 | −0.09 | 1.80 | 4.718 | 2.0490 |
| 351369 | 0.88 | 3.00 | 0.14 | 2.69 | −2.10 | 2.96 | 72 | 0.62 | 1.49 | 0.50 | 1.68 | 4.587 | 2.0480 |
| 346109 | 0.42 | 3.13 | 1.44 | 2.75 | −1.14 | 2.66 | 72 | 0.51 | 0.78 | 2.31 | 0.80 | 4.364 | 2.0440 |
| 349457 | 1.02 | 3.01 | 0.26 | 3.06 | −1.77 | 2.15 | 71 | 0.51 | 1.40 | 0.46 | 1.41 | 4.557 | 2.0410 |
| 351094 | −0.42 | 2.97 | 1.67 | 2.61 | 0.00 | 0.00 | 72 | 0.88 | −0.21 | −8.95 | 1.23 | 3.950 | 2.0380 |
| 354465 | −4.13 | 2.46 | −1.22 | 2.00 | 0.65 | 2.93 | 72 | 0.14 | −2.39 | −0.22 | −2.77 | 5.847 | 2.0330 |
| 349414 | 0.71 | 2.64 | −0.21 | 3.39 | −2.47 | 1.67 | 72 | 0.72 | 1.59 | 0.42 | 1.88 | 5.369 | 2.0320 |
| 352554 | 0.99 | 2.86 | 0.82 | 2.91 | −1.68 | 2.82 | 67 | 0.54 | 1.33 | 0.87 | 1.42 | 4.342 | 2.0310 |
| 353866 | 0.00 | 0.00 | −1.19 | 3.05 | 0.88 | 2.69 | 71 | 0.18 | −0.44 | 3.70 | 0.59 | 3.870 | 2.0310 |
| 352891 | 0.99 | 2.85 | 0.32 | 2.89 | −1.59 | 2.84 | 72 | 0.56 | 1.29 | 0.48 | 1.37 | 4.348 | 2.0300 |
| 351095 | 0.51 | 2.62 | 0.55 | 3.21 | −2.20 | 2.49 | 72 | 0.62 | 1.35 | 1.03 | 1.68 | 4.564 | 2.0210 |
| 345058 | 1.97 | 3.21 | 0.29 | 2.92 | −1.25 | 2.55 | 72 | 0.42 | 1.61 | −0.04 | 1.62 | 4.618 | 2.0190 |
| 344746 | −4.02 | 1.93 | 0.08 | 2.94 | 0.39 | 2.90 | 72 | 0.17 | −2.20 | −0.86 | −3.44 | 6.044 | 2.0190 |
| 343069 | −0.72 | 2.87 | 1.42 | 2.95 | −2.88 | 1.23 | 62 | 0.73 | 1.08 | 2.98 | 2.59 | 7.162 | 2.0190 |
| 354167 | 1.59 | 2.86 | −0.80 | 2.82 | −0.89 | 2.71 | 72 | 0.56 | 1.24 | −0.93 | 1.11 | 4.314 | 2.0110 |
| 344411 | 0.26 | 2.96 | 1.74 | 2.98 | −2.09 | 2.65 | 64 | 0.79 | 1.17 | 2.26 | 2.71 | 4.843 | 2.0070 |
| 346373 | 1.54 | 3.14 | −0.15 | 2.39 | −1.02 | 3.09 | 71 | 0.47 | 1.28 | −0.32 | 1.30 | 4.271 | 2.0030 |

TABLE 21

| | | | | | | | | | | | | | | SEQ |
|---|---|---|---|---|---|---|---|---|---|---|---|---|---|---|
| RBY rank | ident | exp | log(1/P) | | rerank | exp | log(1/P) | | rank | exp | log(1/P) | rank | comb_log(1/P) | ID NO: |
| 1 | 347657 | RBY | 5.000 | 1 | P8F | 0.973 | 1025 | CWT | 0.049 | 7835 | 3.504 | | | 843 |
| 2 | 345212 | RBY | 5.000 | 2 | P8F | 0.103 | 6923 | CWT | 0.319 | 4531 | 3.404 | | | 844 |
| 3 | 351736 | RBY | 4.523 | 4 | P8F | 0.444 | 3258 | CWT | 0.750 | 1889 | 3.214 | | | 846 |
| 4 | 353110 | RBY | 4.523 | 3 | P8F | 0.511 | 2805 | CWT | 0.279 | 4954 | 3.147 | | | 845 |
| 5 | 350185 | RBY | 4.301 | 5 | P8F | 0.768 | 1628 | CWT | 0.543 | 2895 | 3.086 | | | 847 |
| 6 | 345055 | RBY | 3.658 | 8 | P8F | 1.037 | 878 | CWT | 2.519 | 43 | 3.031 | | | 850 |
| 7 | 352465 | RBY | 3.602 | 11 | P8F | 1.036 | 879 | CWT | 2.538 | 39 | 2.997 | | | 853 |
| 8 | 352877 | RBY | 3.585 | 12 | P8F | 1.040 | 869 | CWT | 2.527 | 42 | 2.985 | | | 854 |
| 9 | 353512 | RBY | 3.721 | 7 | P8F | 1.079 | 800 | CWT | 0.836 | 1574 | 2.800 | | | 849 |
| 10 | 353986 | RBY | 3.854 | 6 | P8F | 0.614 | 2264 | CWT | 0.101 | 7086 | 2.688 | | | 848 |
| 11 | 344998 | RBY | 3.180 | 21 | P8F | 2.290 | 56 | CWT | 0.899 | 1385 | 2.651 | | | 860 |
| 12 | 353002 | RBY | 2.824 | 34 | P8F | 1.452 | 385 | CWT | 2.928 | 21 | 2.613 | | | 862 |
| 13 | 350667 | RBY | 2.987 | 25 | P8F | 1.338 | 474 | CWT | 2.277 | 84 | 2.594 | | | 861 |
| 14 | 348851 | RBY | 3.602 | 10 | P8F | 0.054 | 7714 | CWT | 0.991 | 1135 | 2.575 | | | 852 |
| 15 | 353811 | RBY | 3.585 | 13 | P8F | 0.774 | 1614 | CWT | 0.276 | 4977 | 2.565 | | | 855 |
| 16 | 351887 | RBY | 3.602 | 9 | P8F | 0.035 | 8045 | CWT | 0.930 | 1305 | 2.562 | | | 851 |
| 17 | 353017 | RBY | 3.387 | 14 | P8F | 1.306 | 503 | CWT | 0.392 | 3906 | 2.541 | | | 856 |
| 18 | 352224 | RBY | 3.260 | 19 | P8F | 0.872 | 1284 | CWT | 0.979 | 1169 | 2.482 | | | 859 |
| 19 | 349728 | RBY | 3.268 | 18 | P8F | 0.036 | 8029 | CWT | 1.656 | 295 | 2.461 | | | 858 |
| 20 | 346019 | RBY | 3.292 | 16 | P8F | 0.922 | 1146 | CWT | 0.587 | 2648 | 2.446 | | | 857 |
| 21 | 345544 | RBY | 2.666 | 46 | P8F | 2.783 | 17 | CWT | 1.054 | 989 | 2.417 | | | 863 |

The best 21 SNP for retail beef yield after analyses of P8 fat and carcass weight are considered.
RBY rank and ident refers to Table 20, exp is experiment or trait, rby is for retail beef yield, p8f for p8fat, cwt for carcass weight, rerank is the relative ranking of the retail beef yield SNP from Table 19 after consideration of the carcass weight and p8 fat thickness, and comb_log(1/P) is the combined significance value of the three experiments.

[0098] This shows that the top 5 associations are the same as for retail beef yield purely, but that some of the associations further down are reranked and given greater importance based on fat thickness and carcass weight. The results may be correlated by way of the sequence identification number (second column in each Table).

TABLE 22
SNP with high probability of association to RBY after consideration of P8
fat and carcass weight.

| Ident | scaffold | contig chr. | Comment | | SEQ ID NO: |
|---|---|---|---|---|---|
| 352465 | SCAFFOLD80596_16424 | contig65286 | Hsa3 | SENP7 exon | 853 |
| 352877 | SCAFFOLD30708_2335 | contig186691 | Hsa3 | IMPG2 intron | 854 |
| 344998 | SCAFFOLD282025_3342 | contig166161 | Hsa16 | EFCBP2 exon | 855 |
| 353002 | IBISS4snp640 | | Bta24 | DSC2 | 856 |
| 350667 | SCAFFOLD121139_3191 | contig52631 | Hsa12 | intergenic SDS3-LOC144747 | 857 |
| 353811 | SCAFFOLD195717_2202 | contig217113 | no chr. | | 858 |
| 353017 | IBISS4snp879 | | Hsa5 | C5orf18, region incl DCP2, XBPP1 | 859 |
| 352224 | SCAFFOLD240110_25059 | contig482987 | Hsa18 | LAMA3 intron | 860 |
| 349728 | SCAFFOLD91511_3588 | contig516055 | Hsa2 | intergenic LOC344172-KIF5C (LOC391451) | 861 |
| 346019 | SCAFFOLD45848_1894 | contig129146 | no chr. | | 862 |
| 345544 | SCAFFOLD171748_1363 | contig32037 | Hsa12 | intergenic TBX3-LOC440112 | 863 |

Some of these additional positive associations are in the same genomic region or gene as other SNP identified in Table 19, implying multiple hits to the same region and help to confirm that these are true associations. Examples are in the KIF5C region and IMPG2.

TABLE 23
Parallele identifiers for further SNP associated with RBY (retail beef yield)
showing the sequence scaffold, the Baylor College of Medicine sequence contig containing
the SNP, the Genbank Accession of the DNA sequence, and the alternative bases for each
SNP. The exact location of each SNP is shown in the sequence scaffold, the number after
the underscore is the exact base pair from the start of the scaffold.

| ident | Ibiss4 | Sequence scaffold | Baylor Contig | Genbank Accession | SNP bases | SEQ ID NO: |
|---|---|---|---|---|---|---|
| 343676 | Null | SCAFFOLD61161_13201 | Contig264651 | AAFC01264642 | A/G | 864 |
| 343686 | Null | SCAFFOLD70038_5082 | Contig46463 | AAFC01046462 | A/G | 865 |
| 345183 | Null | SCAFFOLD70038_6516 | Contig267483 | AAFC01267474 | A/G | 866 |
| 348558 | Null | SCAFFOLD275605_3060 | Contig307051 | AAFC01307041 | A/G | 867 |
| 348641 | Null | SCAFFOLD310358_3310 | Contig327981 | AAFC01327971 | C/T | 868 |
| 348659 | Null | SCAFFOLD316954_5829 | Contig232078 | AAFC01232072 | A/G | 869 |
| 348797 | Null | SCAFFOLD70054_17340 | Contig359389 | AAFC01359379 | A/G | 870 |
| 349243 | Null | SCAFFOLD215128_19099 | Contig43014 | AAFC01043013 | A/T | 871 |
| 349414 | Null | SCAFFOLD270085_5213 | Contig115177 | AAFC01115173 | A/G | 872 |
| 350070 | Null | SCAFFOLD205652_8347 | Contig119996 | AAFC01119992 | A/G | 873 |
| 350492 | Null | SCAFFOLD70038_4486 | Contig46463 | AAFC01046462 | A/G | 874 |
| 351288 | Null | SCAFFOLD90097_20876 | Contig169910 | AAFC01169904 | A/G | 875 |
| 351296 | Null | SCAFFOLD94123_1093 | Contig235275 | AAFC01235268 | A/C | 876 |
| 351514 | Null | SCAFFOLD192666_11865 | Contig351258 | AAFC01351248 | C/T | 877 |
| 351744 | Null | SCAFFOLD30172_28453 | Contig54331 | AAFC01054330 | A/G | 878 |
| 351886 | Null | SCAFFOLD70038_4640 | Contig46463 | AAFC01046462 | C/T | 879 |
| 354432 | Null | SCAFFOLD201769_1248 | Contig183125 | AAFC01183119 | C/T | 880 |
| 346220 | Null | SCAFFOLD100297_8761 | Contig274152 | AAFC01274143 | G/T | 881 |
| 342814 | Null | SCAFFOLD10496_11993 | Contig353686 | AAFC01353676 | A/G | 882 |
| 345544 | Null | SCAFFOLD171748_1363 | Contig32037 | AAFC01032036 | A/G | 863 |
| 342505 | Null | SCAFFOLD131821_4243 | Contig258386 | AAFC01258377 | G/T | 883 |
| 342541 | Null | SCAFFOLD205782_6486 | Contig337899 | AAFC01337889 | A/G | 884 |
| 343029 | Null | SCAFFOLD29531_1161 | Contig582416 | AAFC01582392 | A/G | 885 |
| 343069 | Null | SCAFFOLD40558_3166 | Contig18928 | AAFC01018928 | A/G | 886 |
| 343107 | Null | SCAFFOLD90080_5962 | Contig222033 | AAFC01222027 | A/G | 887 |
| 343565 | Null | SCAFFOLD30115_1301 | Contig3592 | AAFC01003592 | C/T | 888 |
| 343925 | Null | SCAFFOLD1473_926 | Contig80262 | AAFC01080261 | C/T | 889 |
| 343932 | Null | SCAFFOLD150695_5842 | Contig136621 | AAFC01136616 | A/G | 890 |
| 344010 | Null | SCAFFOLD184185_1569 | Contig181991 | AAFC01181985 | A/G | 891 |
| 344018 | Null | SCAFFOLD186437_1116 | Contig744865 | AAFC01744821 | A/G | 892 |
| 344131 | Null | SCAFFOLD245307_19392 | Contig21810 | AAFC01021810 | C/T | 893 |
| 344183 | Null | SCAFFOLD268752_1509 | Contig85928 | AAFC01085927 | A/T | 894 |
| 344191 | Null | SCAFFOLD270591_7376 | Contig2617 | AAFC01002617 | G/T | 895 |
| 344277 | Null | SCAFFOLD312082_12221 | Contig226381 | AAFC01226375 | A/G | 896 |
| 344411 | Null | SCAFFOLD80071_25898 | Contig29821 | AAFC01029821 | C/G | 897 |
| 344436 | Null | SCAFFOLD92705_1807 | Contig202392 | AAFC01202386 | A/G | 898 |
| 344536 | Null | SCAFFOLD100231_10975 | Contig188868 | AAFC01188862 | C/T | 899 |
| 344701 | Null | SCAFFOLD166104_1102 | Contig160418 | AAFC01160412 | G/T | 900 |
| 344746 | Null | SCAFFOLD195047_10282 | Contig403367 | AAFC01403354 | C/G | 901 |
| 344830 | Null | SCAFFOLD222059_7896 | Contig34733 | AAFC01034732 | C/T | 902 |
| 344838 | Null | SCAFFOLD225628_7865 | Contig115392 | AAFC01115388 | A/G | 903 |
| 344847 | Null | SCAFFOLD230250_13663 | Contig10766 | AAFC01010766 | A/G | 904 |
| 344864 | Null | SCAFFOLD235642_5949 | Contig47850 | AAFC01047849 | C/T | 905 |
| 344973 | Null | SCAFFOLD270296_8097 | Contig517767 | AAFC01517746 | C/T | 906 |
| 344998 | Null | SCAFFOLD282025_3342 | Contig166161 | AAFC01166155 | A/G | 862 |
| 345058 | Null | SCAFFOLD30862_2553 | Contig36867 | AAFC01036866 | C/T | 907 |
| 345165 | Null | SCAFFOLD60719_4705 | Contig149503 | AAFC01149497 | C/T | 908 |
| 345504 | Null | SCAFFOLD160144_12187 | Contig408388 | AAFC01408375 | C/G | 909 |
| 345544 | Null | SCAFFOLD171748_1363 | Contig32037 | AAFC01032036 | A/G | 863 |
| 345555 | Null | SCAFFOLD175439_8685 | Contig435618 | AAFC01435604 | C/T | 910 |
| 345624 | Null | SCAFFOLD205042_52028 | Contig120583 | AAFC01120579 | A/G | 911 |
| 345649 | Null | SCAFFOLD210760_7779 | Contig127376 | AAFC01127371 | C/T | 912 |
| 345669 | Null | SCAFFOLD216080_11820 | Contig200611 | AAFC01200605 | A/G | 913 |
| 345736 | Null | SCAFFOLD241145_9825 | Contig117468 | AAFC01117464 | A/G | 914 |
| 345814 | Null | SCAFFOLD265103_4193 | Contig626589 | AAFC01626561 | A/G | 915 |
| 346006 | Null | SCAFFOLD40979_2070 | Contig251602 | AAFC01251594 | G/T | 916 |
| 346019 | Null | SCAFFOLD45848_1894 | Contig129146 | AAFC01129141 | A/G | 853 |
| 346109 | Null | SCAFFOLD74301_3645 | Contig78575 | AAFC01078574 | C/T | 917 |
| 346122 | Null | SCAFFOLD80060_16638 | Contig78433 | AAFC01078432 | G/T | 918 |
| 346373 | Null | SCAFFOLD15936_11858 | Contig73184 | AAFC01073183 | G/T | 919 |
| 346382 | Null | SCAFFOLD160823_6141 | Contig208493 | AAFC01208487 | A/G | 920 |
| 346426 | Null | SCAFFOLD170731_20633 | Contig543966 | AAFC01543945 | A/G | 921 |
| 346624 | Null | SCAFFOLD246051_2750 | Contig55665 | AAFC01055664 | A/G | 922 |
| 346717 | Null | SCAFFOLD280196_14461 | Contig532607 | AAFC01532586 | C/T | 923 |
| 346742 | Null | SCAFFOLD287116_1821 | Contig62379 | AAFC01062378 | A/T | 924 |
| 346831 | Null | SCAFFOLD317746_15268 | Contig13305 | AAFC01013305 | A/G | 925 |
| 346864 | Null | SCAFFOLD35310_9826 | Contig611044 | AAFC01611017 | C/T | 926 |
| 346881 | Null | SCAFFOLD40305_18584 | Contig217298 | AAFC01217292 | C/T | 927 |
| 346884 | Null | SCAFFOLD40614_7721 | Contig169194 | AAFC01169188 | C/T | 928 |
| 346942 | Null | SCAFFOLD60231_14862 | Contig15101 | AAFC01015101 | C/T | 929 |
| 347013 | Null | SCAFFOLD85585_6225 | Contig128771 | AAFC01128766 | A/G | 930 |
| 347279 | Null | SCAFFOLD168801_862 | Contig407980 | AAFC01407967 | A/C | 931 |
| 347554 | Null | SCAFFOLD260054_24186 | Contig265606 | AAFC01265597 | A/G | 932 |
| 347844 | Null | SCAFFOLD60012_53629 | Contig23420 | AAFC01023420 | C/T | 933 |
| 347846 | Null | SCAFFOLD60231_19610 | Contig736315 | AAFC01736274 | A/G | 934 |
| 348079 | Null | SCAFFOLD11216_1018 | Contig648073 | AAFC01648045 | A/G | 935 |
| 348096 | Null | SCAFFOLD11756_13335 | Contig79774 | AAFC01079773 | A/G | 936 |
| 348115 | Null | SCAFFOLD125326_1284 | Contig569756 | AAFC01569734 | G/T | 937 |
| 348122 | Null | SCAFFOLD126910_2320 | Contig164511 | AAFC01164505 | G/T | 938 |
| 348168 | Null | SCAFFOLD140359_23711 | Contig125039 | AAFC01125034 | C/T | 939 |
| 348287 | Null | SCAFFOLD186806_2279 | Contig239738 | AAFC01239731 | A/G | 940 |
| 348339 | Null | SCAFFOLD205140_17944 | Contig200605 | AAFC01200599 | G/T | 941 |
| 348387 | Null | SCAFFOLD22008_2822 | Contig665733 | AAFC01665704 | A/G | 942 |
| 348452 | Null | SCAFFOLD241780_462 | Contig224973 | AAFC01224967 | C/G | 943 |
| 348549 | Null | SCAFFOLD275031_17117 | Contig425165 | AAFC01425152 | A/G | 944 |
| 348555 | Null | SCAFFOLD275478_9050 | Contig141866 | AAFC01141861 | A/G | 945 |
| 348605 | Null | SCAFFOLD295856_23756 | Contig3923 | AAFC01003923 | A/G | 946 |
| 348607 | Null | SCAFFOLD296686_7831 | Contig64263 | AAFC01064262 | A/G | 947 |
| 348679 | Null | SCAFFOLD333247_299 | Contig771786 | AAFC01771736 | A/G | 948 |
| 348824 | Null | SCAFFOLD81723_6996 | Contig212935 | AAFC01212929 | C/T | 949 |
| 348825 | Null | SCAFFOLD81723_7214 | Contig212935 | AAFC01212929 | C/G | 950 |
| 348976 | Null | SCAFFOLD125326_1171 | Contig569756 | AAFC01569734 | C/T | 951 |
| 349018 | Null | SCAFFOLD141002_4090 | Contig89937 | AAFC01089935 | A/C | 952 |
| 349024 | Null | SCAFFOLD145475_11348 | Contig184223 | AAFC01184217 | A/G | 953 |
| 349040 | Null | SCAFFOLD150293_14373 | Contig130465 | AAFC01130460 | G/T | 954 |
| 349163 | Null | SCAFFOLD190011_29357 | Contig155849 | AAFC01155843 | A/G | 955 |
| 349178 | Null | SCAFFOLD191230_2970 | Contig159461 | AAFC01159455 | G/T | 956 |
| 349457 | Null | SCAFFOLD285252_10781 | Contig438953 | AAFC01438939 | G/T | 957 |
| 349636 | Null | SCAFFOLD55122_7810 | Contig84561 | AAFC01084560 | A/G | 958 |
| 349641 | Null | SCAFFOLD55842_17207 | Contig13161 | AAFC01013161 | C/G | 959 |
| 349728 | Null | SCAFFOLD91511_3588 | Contig276853 | AAFC01276844 | C/T | 858 |
| 349785 | Null | SCAFFOLD100231_10874 | Contig188868 | AAFC01188862 | C/T | 960 |
| 349907 | Null | SCAFFOLD145475_11475 | Contig184223 | AAFC01184217 | C/T | 961 |
| 349919 | Null | SCAFFOLD150945_2291 | Contig473577 | AAFC01473561 | A/T | 962 |
| 350280 | Null | SCAFFOLD285539_13817 | Contig210695 | AAFC01210689 | G/T | 963 |
| 350295 | Null | SCAFFOLD290912_4311 | Contig54538 | AAFC01054537 | A/G | 964 |
| 350397 | Null | SCAFFOLD35092_20269 | Contig288805 | AAFC01288796 | A/T | 965 |
| 350429 | Null | SCAFFOLD49643_12002 | Contig119147 | AAFC01119143 | A/G | 966 |
| 350461 | Null | SCAFFOLD60231_20088 | Contig736315 | AAFC01736274 | A/G | 967 |
| 350495 | Null | SCAFFOLD70270_5697 | Contig249828 | AAFC01249820 | G/T | 968 |
| 350570 | Null | SCAFFOLD94371_446 | Contig754256 | AAFC01754211 | C/G | 969 |
| 350667 | Null | SCAFFOLD121139_3191 | Contig52631 | AAFC01052630 | A/G | 861 |
| 350668 | Null | SCAFFOLD121139_5171 | Contig52631 | AAFC01052630 | C/T | 970 |
| 350780 | Null | SCAFFOLD166988_3684 | Contig10149 | AAFC01010149 | A/G | 971 |
| 351094 | Null | SCAFFOLD305427_17925 | Contig184849 | AAFC01184843 | C/T | 972 |
| 351095 | Null | SCAFFOLD307913_759 | Contig792325 | AAFC01792270 | C/T | 973 |
| 351203 | Null | SCAFFOLD5373_38904 | Contig21156 | AAFC01021156 | A/G | 974 |
| 351219 | Null | SCAFFOLD60231_20057 | Contig736315 | AAFC01736274 | C/T | 975 |
| 351369 | Null | SCAFFOLD110120_25106 | Contig42123 | AAFC01042122 | A/T | 976 |
| 351525 | Null | SCAFFOLD200020_32472 | Contig333666 | AAFC01333656 | C/T | 977 |
| 351572 | Null | SCAFFOLD221335_1225 | Contig60965 | AAFC01060964 | C/T | 978 |
| 351684 | Null | SCAFFOLD275885_2418 | Contig345502 | AAFC01345492 | A/T | 979 |
| 351830 | Null | SCAFFOLD40305_18956 | Contig217298 | AAFC01217292 | A/G | 980 |
| 351850 | Null | SCAFFOLD5176_12230 | Contig48365 | AAFC01048364 | A/G | 981 |
| 351901 | Null | SCAFFOLD80021_27195 | Contig195083 | AAFC01195077 | C/G | 982 |
| 351975 | Null | SCAFFOLD107823_1588 | Contig355581 | AAFC01355571 | A/G | 983 |
| 352026 | Null | SCAFFOLD125326_1056 | Contig569756 | AAFC01569734 | C/T | 984 |
| 352028 | Null | SCAFFOLD125519_9311 | Contig103628 | AAFC01103625 | A/C | 985 |
| 352077 | Null | SCAFFOLD155617_7577 | Contig4087 | AAFC01004087 | A/G | 986 |
| 352133 | Null | SCAFFOLD181569_5642 | Contig17298 | AAFC01017298 | C/T | 987 |
| 352224 | Null | SCAFFOLD240110_25059 | Contig482987 | AAFC01482971 | C/T | 859 |
| 352311 | Null | SCAFFOLD288102_395 | Contig407852 | AAFC01407839 | A/G | 988 |
| 352396 | Null | SCAFFOLD40305_19056 | Contig217298 | AAFC01217292 | C/T | 989 |
| 352445 | Null | SCAFFOLD69981_14378 | Contig82757 | AAFC01082756 | C/T | 990 |
| 352465 | Null | SCAFFOLD80596_16424 | Contig65286 | AAFC01065285 | C/T | 853 |
| 352554 | Null | SCAFFOLD123632_3438 | Contig212890 | AAFC01212884 | C/T | 991 |
| 352556 | Null | SCAFFOLD125013_22381 | Contig151545 | AAFC01151539 | A/C | 992 |
| 352566 | Null | SCAFFOLD131356_3439 | Contig235444 | AAFC01235437 | A/C | 993 |
| 352618 | Null | SCAFFOLD156754_729 | Contig384004 | AAFC01383992 | A/C | 994 |
| 352779 | Null | SCAFFOLD255402_24210 | Contig57357 | AAFC01057356 | C/T | 995 |
| 352877 | Null | SCAFFOLD30708_2335 | Contig186691 | AAFC01186685 | C/T | 854 |
| 352891 | Null | SCAFFOLD318671_297 | Contig422189 | AAFC01422176 | A/G | 996 |
| 352969 | Null | SCAFFOLD80021_27175 | Contig195083 | AAFC01195077 | A/G | 997 |
| 353002 | Null | SCAFFOLD99544_624 | Contig464928 | AAFC01464913 | A/C | 862 |
| 353130 | Null | SCAFFOLD170433_19316 | Contig246027 | AAFC01246019 | A/G | 998 |
| 353161 | Null | SCAFFOLD195717_2054 | Contig217113 | AAFC01217107 | G/T | 999 |
| 353286 | Null | SCAFFOLD291299_3699 | Contig360397 | AAFC01360387 | A/G | 1000 |
| 353471 | Null | SCAFFOLD140124_7042 | Contig170618 | AAFC01170612 | A/G | 1001 |
| 353531 | Null | SCAFFOLD195717_2152 | Contig217113 | AAFC01217107 | A/T | 1002 |
| 353532 | Null | SCAFFOLD195717_2425 | Contig217113 | AAFC01217107 | C/T | 1003 |
| 353682 | Null | SCAFFOLD61490_4909 | Contig6803 | AAFC01006803 | G/T | 1004 |
| 353686 | Null | SCAFFOLD65661_14423 | Contig446928 | AAFC01446914 | A/T | 1005 |
| 353733 | Null | SCAFFOLD100651_19519 | Contig460512 | AAFC01460497 | C/T | 1006 |
| 353802 | Null | SCAFFOLD185286_3978 | Contig509750 | AAFC01509732 | C/T | 1007 |
| 353811 | Null | SCAFFOLD195717_2202 | Contig217113 | AAFC01217107 | A/C | 855 |
| 353853 | Null | SCAFFOLD266133_5948 | Contig153859 | AAFC01153853 | A/G | 1008 |
| 353866 | Null | SCAFFOLD280196_14851 | Contig532607 | AAFC01532586 | A/G | 1009 |
| 354047 | Null | SCAFFOLD280893_11141 | Contig2502 | AAFC01002502 | A/C | 1010 |
| 354061 | Null | SCAFFOLD310542_845 | Contig316380 | AAFC01316370 | C/T | 1011 |
| 354094 | Null | SCAFFOLD80920_10441 | Contig246029 | AAFC01246021 | C/G | 1012 |
| 354108 | Null | SCAFFOLD100305_20665 | Contig12962 | AAFC01012962 | C/T | 1013 |
| 354141 | Null | SCAFFOLD166988_3548 | Contig10149 | AAFC01010149 | A/T | 1014 |
| 354167 | Null | SCAFFOLD236715_293 | Contig355463 | AAFC01355453 | A/C | 1015 |
| 354312 | Null | SCAFFOLD291031_8783 | Contig8197 | AAFC01008197 | A/T | 1016 |
| 354319 | Null | SCAFFOLD314261_290 | Contig68227 | AAFC01068226 | C/T | 1017 |
| 354336 | Null | SCAFFOLD78633_845 | Contig568155 | AAFC01568133 | A/T | 1018 |
| 354465 | Null | SCAFFOLD89532_1964 | Contig202137 | AAFC01202131 | C/T | 1019 |
| 354493 | Null | SCAFFOLD120581_8086 | Contig578507 | AAFC01578483 | A/G | 1020 |

TABLE 24

SNP associated with RBY (retail beef yield)
obtained from the IBISS4 database.

| | |
|---|---|
| IBISS4snpl44 IBISS4 btcn16436 9/16 1400 | A/G |
| GTTTTTGGCTTCAGAGCTGCATACTTGTAGAATTTCACTTGGGATTTCCC | Homo sapiens pyridoxal |
| TAACGGTTACAAACCTGGACCCGCAGGAGGACTGAGGCTCTGACTCAGGC | (pyridoxine, vitamin B6) |
| | kinase (PDXK), |
| | mRNA 0.031 |
| | (SEQ ID NO:1021) |
| IBISS4snp416 IBISS4 btcn24397 11/18 493 | C/T |
| CACTGGAATTCAAAGTATAACAGTTATGCAACTGCTCTGAAGCATGCCGA | Homo sapiens carbonic |
| GGTATAGCTGTGGTTGGGGTTTTTCTGAAG | anhydrase III, muscle specific |
| | (CA3), mRNA0.0 |
| | (SEQ ID NO:1022) |
| IBISS4snp828 IBISS4 btcn43670 6/11 1476 | C/T |
| ATTCTGGATATCATCTTCCGGGACTTCTGCGTGGGCAAGTGAGGGGACAG | Homo sapiens GTP binding |
| GGAAGCTCAGACCCAGGCTGGAGGAGCACCCGGAAGCCTTGGGGTATCTG | protein 3 (mitochondrial) |
| | (GTPBP3), mRNA 0.0 |
| | (SEQ ID NO:1023) |
| IBISS4snp1001 IBISS4 btcn6645 7/11 1142 | T/C |
| TTTCTATTTCTGTAGAGTTTACATGATTTCCCACTGCTTACACTTTAGAA | Homo sapiens |
| GTTTATTTTATGGGGGCTGAGGGATTAAAAGAGTGTGAATGAACAGGTAA | methylenetetrahydrofolate |
| | dehydrogenase (NADP+ dependent) |
| | 1-like (MTHFD1L), mRNA 0.0 |
| | (SEQ ID NO:1024) |
| IBISS4snp1073 IBISS4 btcn8191 5/10 1410 | T/C |
| GTATGTTTGTGTAACACGCAGATGTGTGTTATATTTGAAAGTGATGACTC | Homo sapiens hypothetical protein |
| TGTGAAATGCTAGGAATGTATCGTGTAATTTCTAAAACCTGTGATGCCGT | MGC8721 (MGC8721), |
| | mRNA 1e−108 |
| | (SEQ ID NO:1025) |

### EXAMPLE 7

[0099] To find additional loci affecting retail beef yield, further analyses of the whole genome scan were performed. First, the RBY trait values for all measured individuals, not just the 189 in the whole genome scan, were adjusted using the model rby ˜ mu herd kill_group age ! sireid using ASREML. The residual RBY phenotypes were then available for further analysis. The means and standard errors of the residual RBY for each genotype in the whole genome scan were calculated and at test computed for each comparison. The statistical significance of the largest mean difference was calculated using 100,000 permutations.

TABLE 25
A set of loci with high levels of support associated with residual retail beef
yield. Snp_id is the ParAllele SNP identifier, scaffold-v2 is the version 2 scaffold,
bp is the location of the SNP in the scaffold, scaffold-v1/IBISS4 gives a direct
reference to the SNP, Hsa is the human chromosome associated with the SNP and Gene is
the closest gene to the SNP.

| | | | | | | SEQ |
|---|---|---|---|---|---|---|
| | scaffold- | | | | | ID |
| snp_id | v2 | bp | IBISS4/scaffold-v1 | Hsa | Gene | NO. |
| 343447 | 5.178 | 319773 | SCAFFOLD222082_22390 | 22 | TNRC6B trinucleotide repeat containing 6B | 1026 |
| 353694 | Un.112 | 731683 | SCAFFOLD71700_1626 | 9 | DEC1 deleted in esophageal cancer 1 | 1027 |
| 348480 | Un.2641 | 29191 | SCAFFOLD25364_23392 | 18 | SERPINB10 serine/cysteine proteinase inhibitor, clade B | 1028 |
| | | | | | (ovalbumin), member 10 | |
| 353782 | 27.16 | 748646 | SCAFFOLD155902_5584 | 4 | LOC442118 similar to ODZ3 odd Oz/ten-m homolog 3 | 1029 |
| 350348 | Un.8313 | 33029 | SCAFFOLD311898_4113 | 9 | not near gene | 1030 |
| 348870 | 10.13 | 4702 | IBISS4snp305 | 15 | MGC4562 hypothetical protein | 1031 |
| 345294 | 8.92 | 55081 | IBISS4snp199 | 8 | MGC29816 hypothetical protein | 1032 |
| 346290 | Un.426 | 474982 | SCAFFOLD126235_9752 | 1 | not near gene | 1033 |
| 348610 | Un.407 | 201779 | SCAFFOLD300039_10030 | 1 | FLJ10157 hypothetic protein near SMYD3 SET and MYND | 1034 |
| | | | | | domain containing 3 | |
| 349330 | 10.146 | NULL | SCAFFOLD240809_6669 | 14 | not near gene | 1035 |
| 352978 | 10.105 | 287828 | SCAFFOLD81450_1736 | 15 | between CEP152 (KIAA0912) and KIAA0256 hypothetical | 1036 |
| | | | | | genes | |
| 353814 | Un.12 | 1348480 | SCAFFOLD201310_4882 | 3 | DSCR5 Down syndrome critical region gene 5 | 1037 |

The results of this analysis indicates a further 145 loci of interest (P < 0.01) (Tables 26 and 27) and the top loci not previously covered are shown annotated in Table 25.

TABLE 26
Loci not previously described with association to RBY. Associations between DNA
markers and retail beef yield sorted in decreasing order of statistical significance.
Locus is the ParAllele identifiers of the polymorphisms, N is the number of genotypes,
mean_0 is the mean retail beef yield for genotype 0, mean_1 is the mean for genotype 1, and
mean_2 is the mean of genotype 2, SE is the standard error, a is the additive effect, k is
the dominance effect, alpha is the average effect of allele substitutions, tmax is the
value of the t test, and PermP is the P value determined from 100,000 permutation tests
expressed as a positive integer. A minus value for a means the mean of genotype 0 is lower
than the mean of genotype 2, and a minus value for alpha means that selecting for allele 0
will reduce the average values of retail beef yield in the population. Scaffold-v2 is the
Draft version 2 Bovine genome sequence, bp is the location in base pairs in the scaffold,
and bases are the alternative bases.

| snp_id | scaffold-v2 | bp | bases | mean0 | SE | mean1 | SE | mean2 | SE |
|---|---|---|---|---|---|---|---|---|---|
| 343447 | 5.178 | 319773 | A/G | 0.56 | 0.33 | 0.53 | 0.49 | −1.34 | 0.31 |
| 348480 | Un.2641 | 29191 | A/G | −0.17 | 0.32 | −0.08 | 0.34 | 3.96 | 1.44 |
| 353694 | Un.112 | 731683 | A/C | 4.23 | 1.36 | −0.01 | 0.33 | −0.26 | 0.32 |
| 350348 | Un.8313 | 33029 | C/T | −0.86 | 0.35 | 1.56 | 0.53 | 0.10 | 0.47 |
| 353782 | 27.16 | 748646 | A/T | −0.03 | 0.24 | 4.18 | 1.88 | 0.13 | 1.03 |
| 348870 | 10.13 | 4702 | C/T | 3.17 | 1.57 | −0.81 | 0.34 | 0.54 | 0.34 |
| 349330 | NULL | NULL | G/T | −1.26 | 0.34 | 0.96 | 0.41 | −0.10 | 0.42 |
| 352978 | 10.105 | 287828 | G/T | −0.63 | 0.26 | 0.85 | 0.62 | 1.49 | 0.46 |
| 345294 | 8.92 | 55081 | C/T | 4.28 | 1.93 | −0.65 | 0.42 | 0.22 | 0.30 |
| 346290 | Un.426 | 474982 | A/G | −0.03 | 0.25 | 3.73 | 1.87 | NaN | NaN |
| 348610 | Un.407 | 201779 | C/T | 0.28 | 0.36 | 0.63 | 0.32 | −1.67 | 0.53 |
| 353814 | Un.12 | 1348480 | C/T | 0.05 | 0.35 | −0.60 | 0.33 | 2.04 | 0.81 |

| snp_id | N | Freq | a | k | α | tmax | PermP | |
|---|---|---|---|---|---|---|---|---|
| 343447 | 70 | 0.58 | 0.95 | 0.97 | 1.09 | 3.78 | 0.0001 | SEQ ID NO: 1026 |
| 348480 | 70 | 0.70 | −2.06 | 0.96 | −2.85 | 4.22 | 0.0001 | SEQ ID NO: 1028 |
| 353694 | 70 | 0.29 | 2.25 | −0.89 | 3.10 | 4.59 | 0.0001 | SEQ ID NO: 1027 |
| 350348 | 62 | 0.42 | −0.48 | −4.04 | −0.79 | 3.88 | 0.0003 | SEQ ID NO: 1030 |
| 353782 | 69 | 0.91 | −0.08 | −53.30 | 3.33 | 4.10 | 0.0003 | SEQ ID NO: 1029 |
| 348870 | 70 | 0.25 | 1.32 | −2.03 | 2.65 | 3.85 | 0.0004 | SEQ ID NO: 1031 |
| 349330 | 70 | 0.48 | −0.58 | −2.84 | −0.65 | 3.42 | 0.0004 | SEQ ID NO: 1035 |
| 352978 | 68 | 0.73 | −1.06 | −0.39 | −0.87 | 3.52 | 0.0004 | SEQ ID NO: 1036 |
| 345294 | 68 | 0.18 | 2.03 | −1.43 | 3.90 | 3.92 | 0.0006 | SEQ ID NO: 1032 |
| 346290 | 67 | 0.97 | NaN | NaN | NaN | 3.46 | 0.0008 | SEQ ID NO: 1033 |
| 348610 | 70 | 0.79 | 0.98 | 1.36 | 1.74 | 3.83 | 0.0008 | SEQ ID NO: 1034 |
| 353814 | 70 | 0.66 | −0.99 | 1.66 | −1.51 | 3.60 | 0.0010 | SEQ ID NO: 1037 |

TABLE 27
Further loci associated with RBY. Associations between DNA markers and
retail beef yield sorted in decreasing order of statistical significance. Locus is
the ParAllele identifiers of the polymorphisms, N is the number of genotypes, mean_0
is the mean retail beef yield for genotype 0, mean_1 is the mean for genotype 1, and
mean_2 is the mean of genotype 2, SE is the standard error, a is the additive effect,
k is the dominance effect, alpha is the average effect of allele substitutions, tmax
is the value of the t test, and PermP is the P value determined from 100,000
permutation tests expressed as a positive integer. A minus value for a means the mean
of genotype 0 is lower than the mean of genotype 2, and a minus value for alpha means
that selecting for allele 0 will reduce the average values of retail beef yield in
the population. Scaffold-v2 is the Draft version 2 Bovine genome sequence, bp is the
location in base pairs in the scaffold, and bases are the alternative bases.

| snp_id | scaffold-v2 | bp | bases | mean0 | SE | mean1 | SE | mean2 | SE |
|---|---|---|---|---|---|---|---|---|---|
| 354343 | Un.4413 | 30649 | C/T | −0.09 | 0.53 | 1.01 | 0.42 | −0.84 | 0.34 |
| 344060 | 20.7 | 760485 | C/T | −0.26 | 0.30 | −0.04 | 0.40 | 2.68 | 1.00 |
| 352157 | Un.12 | 1348535 | A/G | 0.05 | 0.35 | −0.60 | 0.33 | 2.04 | 0.81 |
| 353969 | Un.409 | 23076 | C/T | 2.98 | 1.27 | 0.17 | 0.50 | −0.24 | 0.28 |
| 344263 | 1.271 | 88166 | A/G | −0.04 | 0.26 | 2.51 | 0.87 | −2.15 | 0.67 |
| 350078 | 20.7 | 760555 | G/T | −0.33 | 0.30 | 0.04 | 0.40 | 2.68 | 1.00 |
| 353358 | 4.14 | 285151 | C/G | 1.92 | 0.58 | −0.76 | 0.48 | 0.05 | 0.38 |
| 351379 | Un.4413 | 30398 | A/G | −0.09 | 0.53 | 1.01 | 0.42 | −0.84 | 0.34 |
| 345474 | Un.129 | 166181 | C/T | 0.33 | 0.32 | −0.77 | 0.47 | 2.06 | 0.48 |
| 348027 | 4.25 | 162574 | A/C | −2.13 | 0.51 | 0.63 | 0.40 | 0.25 | 0.34 |
| 342893 | Un.1068 | 266682 | G/T | 0.52 | 0.44 | 0.09 | 0.28 | −3.07 | 0.40 |
| 343143 | 2.193 | 674112 | A/G | 3.30 | 1.82 | −0.27 | 0.34 | 0.20 | 0.31 |
| 343973 | Un.1068 | 266615 | A/C | 0.52 | 0.44 | 0.09 | 0.28 | −3.07 | 0.40 |
| 349820 | 25.17 | 595288 | C/T | −0.08 | 0.24 | 2.38 | 1.37 | NaN | NaN |
| 349318 | 29.17 | 156519 | C/T | 0.03 | 0.27 | 3.94 | 2.15 | −1.07 | 1.57 |
| 347219 | Un.653 | 125734 | C/G | 2.72 | 1.23 | −1.57 | 0.52 | 0.22 | 0.29 |
| 344686 | 7.42 | 254134 | A/G | 0.37 | 0.34 | 0.76 | 0.52 | −1.52 | 0.38 |
| 348042 | 16.129 | 249227 | C/T | −0.59 | 0.33 | 0.95 | 0.38 | −0.21 | 0.77 |
| 351653 | 17.48 | 444119 | A/G | 0.37 | 0.46 | −0.55 | 0.33 | 1.77 | 0.61 |
| 349147 | Un.5811 | 49140 | A/T | 0.23 | 0.28 | −2.02 | 0.93 | 1.10 | 0.82 |
| 348078 | 15.108 | 11460 | C/T | 0.56 | 0.37 | −0.87 | 0.35 | 1.52 | 0.80 |
| 352491 | 12.114 | 127963 | C/T | 2.53 | 0.83 | −0.15 | 0.40 | −0.13 | 0.34 |
| 353167 | 19.36 | 9172 | A/G | 2.60 | 1.70 | −0.46 | 0.27 | 0.51 | 0.44 |
| 351531 | Un.545 | 89148 | A/G | NaN | NaN | 2.98 | 0.99 | −0.01 | 0.27 |
| 347102 | 16.129 | 249248 | A/G | −0.21 | 0.77 | 0.96 | 0.39 | −0.59 | 0.33 |
| 349796 | 26.1 | 24979 | G/T | 0.66 | 0.55 | −0.78 | 0.30 | 0.86 | 0.50 |
| 344637 | 9.105 | 303802 | A/G | 0.57 | 0.32 | −1.12 | 0.32 | NaN | NaN |
| 352453 | 9.49 | 251562 | A/G | −0.65 | 0.40 | −0.02 | 0.39 | 1.26 | 0.52 |
| 352213 | Un.5050 | 37699 | C/G | 1.13 | 0.49 | −0.76 | 0.37 | 0.44 | 0.45 |
| 352924 | 15.119 | 50050 | A/G | 0.06 | 0.30 | 0.01 | 0.60 | 2.87 | 0.38 |
| 347799 | 8.1 | 110363 | A/G | −0.22 | 0.33 | 0.16 | 0.35 | 2.97 | 2.05 |
| 353777 | Un.6304 | 40244 | A/G | −0.01 | 0.25 | 3.28 | 1.76 | −0.48 | NaN |
| 354162 | Un.3082 | 36175 | G/T | −2.14 | 0.26 | 0.86 | 0.39 | 0.01 | 0.37 |
| 349265 | Un.1096 | 266107 | C/T | 1.59 | 0.83 | −0.44 | 0.29 | 0.33 | 0.43 |
| 350665 | 7.13 | 230206 | A/G | −0.87 | 0.73 | −1.02 | 0.50 | 0.85 | 0.33 |
| 348488 | Un.1500 | 17313 | C/G | 0.19 | 0.62 | 0.58 | 0.33 | −1.17 | 0.37 |
| 351488 | 12.116 | 226560 | C/T | 0.08 | 0.39 | 0.14 | 0.34 | 3.37 | 0.60 |
| 345275 | Un.5870 | 16352 | G/T | 0.66 | 0.57 | −1.40 | 0.37 | 0.37 | 0.32 |
| 346657 | Un.433 | 207857 | C/G | 2.33 | 0.56 | −0.59 | 0.41 | 0.29 | 0.35 |
| 351225 | 14.83 | 392261 | G/T | 0.45 | 0.40 | −0.63 | 0.34 | 1.47 | 0.74 |
| 353475 | 8.2 | 73914 | A/C | −0.25 | 0.32 | −0.11 | 0.43 | 1.86 | 0.84 |
| 350926 | 10.146 | 523255 | A/T | −1.24 | 0.38 | 0.53 | 0.37 | 0.56 | 0.53 |
| 352221 | Un.4383 | 55920 | A/T | 0.25 | 0.31 | 0.40 | 0.46 | −1.57 | 0.45 |
| 346891 | 16.31 | 307800 | A/G | 1.26 | 0.56 | −0.44 | 0.33 | −0.03 | 0.54 |
| 350862 | 9.87 | 1287524 | C/T | 0.60 | 0.31 | −1.24 | 0.42 | 0.22 | 1.26 |
| 352012 | Un.968 | 241970 | A/G | 0.33 | 0.53 | −0.55 | 0.32 | 1.21 | 0.55 |
| 353504 | Un.974 | 227042 | A/G | −0.39 | 0.25 | 1.36 | 0.68 | 0.55 | 0.82 |
| 354195 | NULL | NULL | A/T | 0.57 | 0.34 | −0.96 | 0.35 | 1.79 | 1.31 |
| 345778 | Un.4647 | 26812 | C/T | 1.97 | 0.83 | 0.18 | 0.45 | −0.30 | 0.32 |
| 346928 | 15.56 | 738365 | A/G | −3.76 | NaN | 1.46 | 0.49 | −0.28 | 0.29 |
| 348864 | 5.175 | 82168 | A/G | 2.91 | 1.44 | −0.33 | 0.37 | 0.14 | 0.36 |
| 346477 | 18.21 | 504871 | A/C | 0.08 | 0.90 | 1.19 | 0.63 | −0.48 | 0.28 |
| 347589 | 12.105 | 744521 | C/T | 0.20 | 0.31 | −0.57 | 0.37 | 1.14 | 0.55 |
| 348449 | 10.146 | 523467 | C/T | 0.49 | 0.51 | 0.60 | 0.39 | −1.24 | 0.38 |
| 352697 | Un.12 | 1348435 | C/G | −0.07 | 0.32 | −0.51 | 0.39 | 2.04 | 0.89 |
| 349052 | 14.79 | 314697 | G/T | 0.31 | 1.52 | −0.94 | 0.35 | 0.60 | 0.33 |
| 343517 | Un.2305 | 108919 | A/G | −0.73 | 0.31 | 2.14 | 3.03 | 0.60 | 0.34 |
| 347425 | 25.88 | 445813 | A/G | 0.88 | 0.41 | −0.97 | 0.40 | 0.23 | 0.52 |
| 348867 | 3.166 | 23849 | C/T | 2.51 | 1.12 | −0.72 | 0.49 | 0.22 | 0.31 |
| 353212 | 10.146 | 525357 | C/G | 0.17 | 0.49 | 0.61 | 0.37 | −1.30 | 0.45 |
| 346115 | 2.72 | 433544 | C/T | 3.06 | 1.70 | 0.71 | 0.46 | −0.24 | 0.29 |
| 346232 | Un.159 | 456024 | A/G | −0.16 | 0.33 | −0.19 | 0.38 | 1.98 | 0.91 |
| 346976 | 14.79 | 311117 | C/G | 0.60 | 0.33 | −0.94 | 0.35 | 0.31 | 1.52 |
| 346890 | 16.31 | 310948 | A/G | 1.26 | 0.56 | −0.40 | 0.32 | −0.03 | 0.54 |
| 343386 | Un.4575 | 30175 | C/T | −1.75 | 0.43 | 1.16 | 0.60 | 0.16 | 0.31 |
| 343526 | 8.128 | 88682 | C/T | NaN | NaN | 3.76 | 2.17 | 0.01 | 0.25 |
| 348771 | 16.18 | 290928 | A/C | 0.32 | 0.38 | 0.52 | 0.35 | −1.57 | 0.66 |
| 352285 | 22.45 | 420733 | C/G | 2.05 | 0.99 | −0.18 | 0.57 | −0.08 | 0.28 |
| 343589 | NULL | NULL | C/T | 0.84 | 0.32 | −0.69 | 0.47 | −0.78 | 0.91 |
| 346225 | Un.3643 | 40063 | A/G | −0.20 | 1.54 | 1.43 | 0.71 | −0.27 | 0.26 |
| 346963 | 6.197 | 964490 | C/T | −0.76 | 0.70 | 1.45 | 0.61 | −0.20 | 0.29 |
| 347235 | 11.185 | 98871 | C/T | −0.15 | 0.28 | 0.58 | 0.50 | 3.31 | 2.65 |
| 352932 | Un.2934 | 66595 | C/T | 0.66 | 0.36 | −0.86 | 0.35 | 1.09 | 1.21 |
| 344987 | Un.763 | 211063 | C/T | 0.41 | 0.28 | −1.74 | 0.56 | NaN | NaN |
| 345162 | 14.43 | 596224 | A/G | 1.02 | 0.50 | −0.50 | 0.30 | 0.73 | 0.82 |
| 353824 | Un.217 | 382674 | A/G | 0.70 | 0.55 | −0.57 | 0.31 | 0.96 | 0.48 |
| 342514 | 28.2 | 122416 | C/T | 1.53 | 1.08 | −0.73 | 0.34 | 0.29 | 0.35 |
| 350192 | Un.433 | 207646 | C/T | 2.33 | 0.56 | −0.59 | 0.41 | 0.31 | 0.34 |
| 352518 | Un.3536 | 57752 | C/T | −0.06 | 0.26 | 2.22 | 1.12 | −0.14 | 3.02 |
| 354161 | Un.3082 | 36240 | C/T | 0.04 | 0.38 | 0.83 | 0.39 | −1.38 | 0.58 |
| 344034 | Un.1794 | 114318 | C/T | −1.20 | 1.23 | 1.45 | 0.61 | −0.46 | 0.31 |
| 343548 | Un.2274 | 24581 | A/G | −0.46 | NaN | 3.24 | 1.69 | 0.03 | 0.25 |
| 346163 | 22.96 | 5306 | A/G | 1.07 | 0.47 | −1.61 | 0.62 | 0.35 | 0.31 |
| 347731 | 23.89 | 22357 | C/T | −0.10 | 0.41 | 2.57 | 1.15 | −0.04 | 0.27 |
| 347988 | 4.136 | 966787 | G/T | 1.11 | 0.58 | −0.57 | 0.30 | 0.12 | 0.44 |
| 346563 | 20.29 | 1125490 | C/T | −0.02 | 0.29 | 0.21 | 0.36 | 3.52 | 2.31 |
| 349526 | Un.321 | 388395 | A/C | 1.33 | 0.69 | −0.59 | 0.32 | 0.26 | 0.37 |
| 350110 | Un.1295 | 148066 | C/T | 0.23 | 0.32 | −0.63 | 0.49 | 2.36 | 0.83 |
| 346359 | 11.185 | 98726 | A/G | 3.31 | 2.65 | 0.58 | 0.50 | −0.15 | 0.28 |
| 344197 | 10.112 | 549674 | A/G | −0.17 | 0.26 | 1.69 | 0.74 | −2.78 | NaN |
| 345543 | 11.14 | 100358 | G/T | 0.11 | 0.56 | −0.69 | 0.33 | 0.84 | 0.43 |
| 348364 | 22.52 | 8443 | A/G | 2.24 | 1.22 | −0.45 | 0.34 | 0.39 | 0.38 |
| 349329 | 10.146 | 525762 | C/T | 0.25 | 0.46 | 0.61 | 0.37 | −1.30 | 0.45 |
| 352030 | Un.2336 | 110962 | C/T | −0.37 | 0.53 | 1.03 | 0.42 | −0.55 | 0.38 |
| 349054 | 6.132 | 410321 | A/G | −0.14 | 1.25 | 1.20 | 0.49 | −0.32 | 0.31 |
| 346097 | 29.2 | 47615 | G/T | 0.77 | 0.69 | −0.45 | 0.30 | 1.09 | 0.51 |
| 347411 | 11.38 | 390008 | C/T | −0.52 | 0.34 | 1.15 | 0.51 | 0.04 | 0.51 |
| 344199 | 24.77 | 1186297 | C/G | −0.07 | 0.44 | −0.39 | 0.35 | 1.48 | 0.66 |
| 348199 | 6.51 | 218288 | A/C | 0.36 | 0.10 | 1.25 | 0.59 | −0.29 | 0.28 |
| 353569 | 10.146 | 523534 | A/G | −1.30 | 0.45 | 0.60 | 0.38 | 0.25 | 0.46 |
| 344596 | 3.99 | 215890 | A/G | 0.38 | 0.56 | −0.64 | 0.40 | 0.81 | 0.34 |
| 353284 | Un.4 | 943455 | G/T | −0.39 | 0.28 | 1.14 | 0.55 | 1.24 | 0.80 |
| 352909 | 14.43 | 586581 | C/G | 0.89 | 0.53 | −0.59 | 0.28 | 0.90 | 0.69 |
| 343004 | 12.107 | 290962 | C/T | −0.14 | 0.33 | −0.07 | 0.36 | 2.29 | 1.24 |
| 351453 | 29.18 | 185260 | A/G | 0.16 | 0.34 | −0.21 | 0.36 | 2.86 | 1.93 |
| 351946 | Un.68 | 155551 | C/T | −1.18 | 0.62 | 1.19 | 0.53 | −0.01 | 0.32 |
| 348729 | 6.128 | 348301 | A/C | 0.17 | 0.31 | −0.45 | 0.48 | 2.60 | 1.16 |
| 349694 | Un.241 | 15362 | C/T | 2.04 | 1.27 | −0.84 | 0.46 | 0.33 | 0.31 |
| 352290 | 2.34 | 19014 | C/T | 2.50 | 1.37 | 0.07 | 0.33 | −0.25 | 0.34 |
| 353571 | 9.16 | 701082 | C/T | 3.70 | 2.34 | −0.26 | 0.68 | 0.06 | 0.27 |
| 346774 | 18.14 | 693589 | A/G | −0.88 | 0.59 | 0.76 | 0.30 | 0.05 | 0.46 |
| 342952 | 25.44 | 4857 | C/T | 3.15 | 1.76 | −0.61 | 0.68 | 0.16 | 0.28 |
| 351900 | 20.7 | 780383 | A/G | −0.58 | 1.64 | −0.77 | 0.33 | 0.71 | 0.35 |
| 353979 | 13.162 | 224309 | G/T | 1.16 | 2.37 | 1.05 | 0.43 | −0.34 | 0.30 |
| 351500 | Un.60 | 811877 | A/G | 0.29 | 0.33 | −0.61 | 0.39 | 1.27 | 0.52 |
| 343483 | 10.156 | 419505 | C/G | −0.28 | 0.27 | 1.34 | 0.69 | 1.38 | NaN |
| 345229 | Un.5650 | 47471 | C/T | 1.18 | 0.53 | −0.40 | 0.32 | 0.25 | 0.68 |
| 348702 | 5.183 | 177029 | C/T | −0.05 | 0.35 | −0.38 | 0.36 | 1.62 | 0.73 |
| 352790 | 5.175 | 641378 | A/G | 1.45 | 0.80 | −0.81 | 0.33 | 0.17 | 0.29 |
| 346071 | 28.4 | 443112 | A/G | 0.21 | 0.53 | −0.72 | 0.39 | 0.87 | 0.43 |
| 343443 | 2.92 | 500532 | A/G | 0.35 | 0.29 | −1.64 | 0.50 | 1.12 | 1.62 |
| 353654 | 5.183 | 176974 | C/T | −0.05 | 0.35 | −0.34 | 0.38 | 1.80 | 0.76 |
| 348109 | 6.2 | 192460 | G/T | −0.94 | 0.28 | 0.70 | 0.38 | 0.05 | 0.75 |
| 352690 | Un.4452 | 47008 | C/T | −0.35 | 0.93 | −0.59 | 0.35 | 0.81 | 0.39 |
| 347812 | 1.184 | 88793 | C/G | −0.42 | 0.32 | 1.16 | 0.60 | 0.22 | 0.72 |
| 349320 | 18.51 | 986902 | A/G | 0.18 | 0.40 | −0.30 | 0.38 | 1.88 | 0.60 |
| 351125 | NULL | NULL | A/G | 0.24 | 0.33 | −0.65 | 0.43 | 1.97 | 0.89 |
| 345061 | Un.3252 | 46984 | A/T | −0.09 | 0.26 | 1.71 | 0.85 | −1.82 | 0.76 |
| 345972 | 30.75 | 281522 | C/T | NaN | NaN | 2.56 | 1.86 | −0.02 | 0.24 |
| 349045 | 14.88 | 143850 | A/C | 0.03 | 0.27 | −0.07 | 0.72 | 2.57 | 2.06 |
| 348554 | 1.18 | 19430 | A/T | −0.16 | 0.24 | 2.00 | 1.31 | 1.72 | 1.77 |
| 349093 | 16.69 | 106244 | A/G | 1.12 | 0.40 | −0.44 | 0.37 | 0.34 | 0.44 |

| snp_id | N | Freq | a | k | α | tmax | PermP | |
|---|---|---|---|---|---|---|---|---|
| 354343 | 70 | 0.44 | 0.37 | 3.95 | 0.20 | 3.20 | 0.0009 | SEQ ID NO: 1038 |
| 344060 | 70 | 0.67 | −1.47 | 0.85 | −1.90 | 3.79 | 0.0010 | SEQ ID NO: 1039 |
| 352157 | 70 | 0.66 | −0.99 | 1.66 | −1.51 | 3.60 | 0.0010 | SEQ ID NO: 1040 |
| 353969 | 69 | 0.23 | 1.61 | −0.74 | 2.25 | 3.64 | 0.0010 | SEQ ID NO: 1041 |
| 344263 | 70 | 0.88 | 1.06 | 3.42 | 3.79 | 3.51 | 0.0011 | SEQ ID NO: 1042 |
| 350078 | 70 | 0.68 | −1.51 | 0.75 | −1.91 | 3.88 | 0.0013 | SEQ ID NO: 1043 |
| 353358 | 64 | 0.30 | 0.93 | −1.87 | 1.62 | 3.54 | 0.0013 | SEQ ID NO: 1044 |
| 351379 | 70 | 0.44 | 0.37 | 3.95 | 0.20 | 3.20 | 0.0014 | SEQ ID NO: 1045 |
| 345474 | 70 | 0.85 | −0.86 | 2.27 | −2.24 | 2.58 | 0.0015 | SEQ ID NO: 1046 |
| 348027 | 68 | 0.16 | −1.19 | −1.32 | −2.25 | 3.46 | 0.0015 | SEQ ID NO: 1047 |
| 342893 | 70 | 0.73 | 1.80 | 0.76 | 2.42 | 3.35 | 0.0016 | SEQ ID NO: 1048 |
| 343143 | 66 | 0.24 | 1.55 | −1.30 | 2.59 | 3.31 | 0.0016 | SEQ ID NO: 1049 |
| 343973 | 70 | 0.73 | 1.80 | 0.76 | 2.42 | 3.35 | 0.0017 | SEQ ID NO: 1050 |
| 349820 | 70 | 0.95 | NaN | NaN | NaN | 2.91 | 0.0017 | SEQ ID NO: 1051 |
| 349318 | 66 | 0.95 | 0.55 | 8.10 | 4.54 | 3.07 | 0.0019 | SEQ ID NO: 1052 |
| 347219 | 68 | 0.09 | 1.25 | −2.44 | 3.75 | 3.88 | 0.0020 | SEQ ID NO: 1053 |
| 344686 | 69 | 0.64 | 0.94 | 1.42 | 1.33 | 3.14 | 0.0022 | SEQ ID NO: 1054 |
| 348042 | 70 | 0.58 | −0.19 | −7.12 | 0.02 | 2.97 | 0.0022 | SEQ ID NO: 1055 |
| 351653 | 68 | 0.65 | −0.70 | 2.31 | −1.20 | 3.41 | 0.0023 | SEQ ID NO: 1056 |
| 349147 | 70 | 0.94 | −0.44 | 6.13 | −2.78 | 2.52 | 0.0024 | SEQ ID NO: 1057 |
| 348078 | 70 | 0.73 | −0.48 | 3.99 | −1.35 | 3.08 | 0.0025 | SEQ ID NO: 1058 |
| 352491 | 70 | 0.33 | 1.33 | −1.01 | 1.79 | 3.38 | 0.0025 | SEQ ID NO: 1059 |
| 353167 | 69 | 0.33 | 1.05 | −1.93 | 1.72 | 3.26 | 0.0025 | SEQ ID NO: 1060 |
| 351531 | 67 | 0.04 | NaN | NaN | NaN | 3.05 | 0.0028 | SEQ ID NO: 1061 |
| 347102 | 69 | 0.42 | 0.19 | 7.18 | −0.03 | 2.95 | 0.0029 | SEQ ID NO: 1062 |
| 349796 | 70 | 0.49 | −0.10 | 15.92 | −0.07 | 2.93 | 0.0029 | SEQ ID NO: 1063 |
| 344637 | 69 | 0.88 | NaN | NaN | NaN | 2.84 | 0.0031 | SEQ ID NO: 1064 |
| 352453 | 70 | 0.51 | −0.96 | 0.34 | −0.97 | 2.94 | 0.0032 | SEQ ID NO: 1065 |
| 352213 | 70 | 0.41 | 0.35 | −4.48 | 0.63 | 3.12 | 0.0033 | SEQ ID NO: 1066 |
| 352924 | 70 | 0.83 | −1.41 | 1.03 | −2.36 | 2.30 | 0.0033 | SEQ ID NO: 1067 |
| 347799 | 70 | 0.67 | −1.60 | 0.76 | −2.02 | 2.87 | 0.0034 | SEQ ID NO: 1068 |
| 353777 | 70 | 0.96 | 0.23 | 15.14 | 3.46 | 3.02 | 0.0034 | SEQ ID NO: 1069 |
| 354162 | 69 | 0.23 | −1.08 | −1.78 | −2.11 | 3.06 | 0.0035 | SEQ ID NO: 1070 |
| 349265 | 70 | 0.47 | 0.63 | −2.22 | 0.71 | 2.94 | 0.0036 | SEQ ID NO: 1071 |
| 350665 | 66 | 0.21 | −0.86 | 1.18 | −0.28 | 3.01 | 0.0036 | SEQ ID NO: 1072 |
| 348488 | 70 | 0.56 | 0.68 | 1.58 | 0.80 | 2.80 | 0.0039 | SEQ ID NO: 1073 |
| 351488 | 65 | 0.78 | −1.64 | 0.97 | −2.52 | 3.34 | 0.0039 | SEQ ID NO: 1074 |
| 345275 | 68 | 0.16 | 0.15 | −12.97 | 1.44 | 3.02 | 0.0041 | SEQ ID NO: 1075 |
| 346657 | 69 | 0.20 | 1.02 | −1.86 | 2.15 | 3.02 | 0.0041 | SEQ ID NO: 1076 |
| 351225 | 70 | 0.72 | −0.51 | 3.13 | −1.22 | 2.83 | 0.0041 | SEQ ID NO: 1077 |
| 353475 | 68 | 0.63 | −1.05 | 0.87 | −1.30 | 2.92 | 0.0041 | SEQ ID NO: 1078 |
| 350926 | 69 | 0.44 | −0.90 | −0.97 | −1.00 | 2.82 | 0.0042 | SEQ ID NO: 1079 |
| 352221 | 68 | 0.67 | 0.91 | 1.17 | 1.27 | 2.94 | 0.0042 | SEQ ID NO: 1080 |
| 346891 | 69 | 0.51 | 0.64 | −1.64 | 0.61 | 2.83 | 0.0043 | SEQ ID NO: 1081 |
| 350862 | 70 | 0.86 | 0.19 | −8.81 | −0.99 | 3.02 | 0.0045 | SEQ ID NO: 1082 |
| 352012 | 70 | 0.52 | −0.44 | 2.99 | −0.50 | 2.98 | 0.0046 | SEQ ID NO: 1083 |
| 353504 | 69 | 0.79 | −0.47 | −2.72 | 0.27 | 2.98 | 0.0046 | SEQ ID NO: 1084 |
| 354195 | 68 | 0.79 | −0.61 | 3.52 | −1.87 | 2.90 | 0.0046 | SEQ ID NO: 1085 |
| 345778 | 68 | 0.34 | 1.14 | −0.58 | 1.35 | 3.12 | 0.0047 | SEQ ID NO: 1086 |
| 346928 | 70 | 0.16 | −1.74 | −2.00 | −4.12 | 3.18 | 0.0048 | SEQ ID NO: 1087 |
| 348864 | 68 | 0.26 | 1.39 | −1.33 | 2.26 | 3.15 | 0.0048 | SEQ ID NO: 1088 |
| 346477 | 62 | 0.27 | 0.28 | 4.90 | −0.34 | 2.83 | 0.0049 | SEQ ID NO: 1089 |
| 347589 | 70 | 0.45 | −0.47 | 2.64 | −0.34 | 2.67 | 0.0049 | SEQ ID NO: 1090 |
| 348449 | 68 | 0.57 | 0.87 | 1.12 | 0.99 | 2.88 | 0.0049 | SEQ ID NO: 1091 |
| 352697 | 69 | 0.70 | −1.05 | 1.42 | −1.64 | 3.06 | 0.0049 | SEQ ID NO: 1092 |
| 349052 | 70 | 0.19 | −0.15 | 9.59 | 0.71 | 2.69 | 0.0050 | SEQ ID NO: 1093 |
| 343517 | 69 | 0.41 | −0.67 | −3.32 | −1.05 | 2.72 | 0.0051 | SEQ ID NO: 1094 |
| 347425 | 69 | 0.57 | 0.33 | −4.65 | 0.13 | 3.11 | 0.0051 | SEQ ID NO: 1095 |
| 348867 | 69 | 0.18 | 1.15 | −1.82 | 2.47 | 3.06 | 0.0051 | SEQ ID NO: 1096 |
| 353212 | 67 | 0.60 | 0.74 | 1.59 | 0.98 | 2.82 | 0.0051 | SEQ ID NO: 1097 |
| 346115 | 70 | 0.17 | 1.65 | −0.42 | 2.11 | 2.93 | 0.0053 | SEQ ID NO: 1098 |
| 346232 | 70 | 0.69 | −1.07 | 1.03 | −1.49 | 2.76 | 0.0053 | SEQ ID NO: 1099 |
| 346976 | 70 | 0.81 | 0.15 | −9.59 | −0.71 | 2.69 | 0.0053 | SEQ ID NO: 1100 |
| 346890 | 70 | 0.51 | 0.64 | −1.58 | 0.62 | 2.80 | 0.0055 | SEQ ID NO: 1101 |
| 343386 | 70 | 0.14 | −0.96 | −2.04 | −2.35 | 3.16 | 0.0056 | SEQ ID NO: 1102 |
| 343526 | 70 | 0.02 | NaN | NaN | NaN | 3.02 | 0.0056 | SEQ ID NO: 1103 |
| 348771 | 70 | 0.74 | 0.95 | 1.21 | 1.48 | 2.98 | 0.0056 | SEQ ID NO: 1104 |
| 352285 | 70 | 0.26 | 1.07 | −1.09 | 1.64 | 2.86 | 0.0056 | SEQ ID NO: 1105 |
| 343589 | 69 | 0.74 | 0.81 | −0.88 | 0.47 | 2.72 | 0.0058 | SEQ ID NO: 1106 |
| 346225 | 67 | 0.17 | 0.03 | 47.70 | −1.05 | 2.76 | 0.0059 | SEQ ID NO: 1107 |
| 346963 | 70 | 0.23 | −0.28 | −6.95 | −1.33 | 2.77 | 0.0060 | SEQ ID NO: 1108 |
| 347235 | 70 | 0.84 | −1.73 | 0.58 | −2.41 | 2.68 | 0.0060 | SEQ ID NO: 1109 |
| 352932 | 70 | 0.76 | −0.22 | 8.03 | −1.10 | 2.82 | 0.0060 | SEQ ID NO: 1110 |
| 344987 | 70 | 0.94 | NaN | NaN | NaN | 2.68 | 0.0061 | SEQ ID NO: 1111 |
| 345162 | 69 | 0.59 | 0.15 | −9.46 | −0.11 | 2.75 | 0.0062 | SEQ ID NO: 1112 |
| 353824 | 70 | 0.59 | −0.13 | 10.94 | −0.37 | 2.67 | 0.0062 | SEQ ID NO: 1113 |
| 342514 | 68 | 0.28 | 0.62 | −2.63 | 1.35 | 2.60 | 0.0063 | SEQ ID NO: 1114 |
| 350192 | 70 | 0.20 | 1.01 | −1.89 | 2.16 | 3.02 | 0.0063 | SEQ ID NO: 1115 |
| 352518 | 70 | 0.92 | 0.04 | 59.62 | 1.99 | 2.72 | 0.0063 | SEQ ID NO: 1116 |
| 354161 | 70 | 0.73 | 0.71 | 2.11 | 1.40 | 2.79 | 0.0063 | SEQ ID NO: 1117 |
| 344034 | 56 | 0.25 | −0.37 | −6.12 | −1.51 | 3.09 | 0.0065 | SEQ ID NO: 1118 |
| 343548 | 69 | 0.04 | −0.25 | −14.10 | −3.40 | 2.94 | 0.0067 | SEQ ID NO: 1119 |
| 346163 | 69 | 0.14 | 0.36 | −6.44 | 2.01 | 3.24 | 0.0068 | SEQ ID NO: 1120 |
| 347731 | 69 | 0.07 | −0.03 | −85.07 | −2.29 | 2.82 | 0.0068 | SEQ ID NO: 1121 |
| 347988 | 69 | 0.57 | 0.50 | −2.39 | 0.34 | 2.72 | 0.0068 | SEQ ID NO: 1122 |
| 346563 | 70 | 0.87 | −1.77 | 0.87 | −2.92 | 2.63 | 0.0069 | SEQ ID NO: 1123 |
| 349526 | 69 | 0.22 | 0.54 | −2.60 | 1.30 | 2.92 | 0.0070 | SEQ ID NO: 1124 |
| 350110 | 70 | 0.84 | −1.07 | 1.81 | −2.36 | 2.87 | 0.0071 | SEQ ID NO: 1125 |
| 346359 | 70 | 0.16 | 1.73 | −0.58 | 2.41 | 2.68 | 0.0072 | SEQ ID NO: 1126 |
| 344197 | 70 | 0.89 | 1.31 | 2.42 | 3.75 | 2.96 | 0.0073 | SEQ ID NO: 1127 |
| 345543 | 70 | 0.33 | −0.36 | 3.18 | 0.03 | 2.66 | 0.0073 | SEQ ID NO: 1128 |
| 348364 | 70 | 0.31 | 0.93 | −1.90 | 1.58 | 2.86 | 0.0073 | SEQ ID NO: 1129 |
| 349329 | 70 | 0.62 | 0.78 | 1.46 | 1.05 | 2.82 | 0.0073 | SEQ ID NO: 1130 |
| 352030 | 70 | 0.43 | 0.09 | 16.66 | −0.12 | 2.72 | 0.0073 | SEQ ID NO: 1131 |
| 349054 | 70 | 0.20 | 0.09 | 16.38 | −0.77 | 2.73 | 0.0075 | SEQ ID NO: 1132 |
| 346097 | 70 | 0.36 | −0.16 | 8.47 | 0.21 | 2.77 | 0.0076 | SEQ ID NO: 1133 |
| 347411 | 69 | 0.62 | −0.28 | −4.96 | 0.04 | 2.82 | 0.0076 | SEQ ID NO: 1134 |
| 344199 | 67 | 0.51 | −0.78 | 1.41 | −0.81 | 2.76 | 0.0077 | SEQ ID NO: 1135 |
| 348199 | 70 | 0.17 | 0.33 | 3.75 | −0.48 | 2.69 | 0.0077 | SEQ ID NO: 1136 |
| 353569 | 69 | 0.38 | −0.78 | −1.45 | −1.06 | 2.76 | 0.0078 | SEQ ID NO: 1137 |
| 344596 | 67 | 0.54 | −0.21 | 5.83 | −0.32 | 2.76 | 0.0080 | SEQ ID NO: 1138 |
| 353284 | 68 | 0.77 | −0.81 | −0.89 | −0.42 | 2.77 | 0.0081 | SEQ ID NO: 1139 |
| 352909 | 69 | 0.60 | −0.01 | 276.76 | −0.31 | 2.62 | 0.0082 | SEQ ID NO: 1140 |
| 343004 | 70 | 0.69 | −1.22 | 0.94 | −1.64 | 2.73 | 0.0083 | SEQ ID NO: 1141 |
| 351453 | 70 | 0.74 | −1.35 | 1.28 | −2.18 | 2.62 | 0.0083 | SEQ ID NO: 1142 |
| 351946 | 70 | 0.26 | −0.58 | −3.06 | −1.42 | 2.68 | 0.0083 | SEQ ID NO: 1143 |
| 348729 | 70 | 0.79 | −1.22 | 1.51 | −2.26 | 2.72 | 0.0085 | SEQ ID NO: 1144 |
| 349694 | 70 | 0.19 | 0.85 | −2.37 | 2.10 | 2.68 | 0.0085 | SEQ ID NO: 1145 |
| 352290 | 70 | 0.32 | 1.37 | −0.76 | 1.75 | 2.87 | 0.0085 | SEQ ID NO: 1146 |
| 353571 | 70 | 0.11 | 1.82 | −1.17 | 3.47 | 2.90 | 0.0085 | SEQ ID NO: 1147 |
| 346774 | 70 | 0.34 | −0.47 | −2.52 | −0.84 | 2.74 | 0.0086 | SEQ ID NO: 1148 |
| 342952 | 70 | 0.12 | 1.49 | −1.52 | 3.21 | 2.41 | 0.0087 | SEQ ID NO: 1149 |
| 351900 | 70 | 0.21 | −0.65 | 1.29 | −0.16 | 2.73 | 0.0087 | SEQ ID NO: 1150 |
| 353979 | 68 | 0.22 | 0.75 | 0.85 | 0.39 | 2.68 | 0.0088 | SEQ ID NO: 1151 |
| 351500 | 65 | 0.58 | −0.49 | 2.86 | −0.72 | 2.54 | 0.0089 | SEQ ID NO: 1152 |
| 343483 | 68 | 0.86 | −0.83 | −0.95 | −0.26 | 2.66 | 0.0090 | SEQ ID NO: 1153 |
| 345229 | 69 | 0.52 | 0.46 | −2.40 | 0.42 | 2.70 | 0.0091 | SEQ ID NO: 1154 |
| 348702 | 70 | 0.57 | −0.83 | 1.40 | −1.00 | 2.76 | 0.0091 | SEQ ID NO: 1155 |
| 352790 | 70 | 0.07 | 0.64 | −2.53 | 2.03 | 2.92 | 0.0091 | SEQ ID NO: 1156 |
| 346071 | 69 | 0.38 | −0.33 | 3.87 | −0.02 | 2.66 | 0.0092 | SEQ ID NO: 1157 |
| 343443 | 69 | 0.90 | −0.39 | 6.14 | −2.28 | 2.46 | 0.0093 | SEQ ID NO: 1158 |
| 353654 | 66 | 0.58 | −0.92 | 1.32 | −1.13 | 2.85 | 0.0093 | SEQ ID NO: 1159 |
| 348109 | 68 | 0.54 | −0.50 | −2.29 | −0.40 | 2.67 | 0.0094 | SEQ ID NO: 1160 |
| 352690 | 70 | 0.27 | −0.58 | 1.42 | −0.20 | 2.60 | 0.0095 | SEQ ID NO: 1161 |
| 347812 | 65 | 0.65 | −0.32 | −3.91 | 0.05 | 2.56 | 0.0097 | SEQ ID NO: 1162 |
| 349320 | 70 | 0.71 | −0.85 | 1.57 | −1.40 | 2.70 | 0.0097 | SEQ ID NO: 1163 |
| 351125 | 70 | 0.76 | −0.87 | 2.03 | −1.80 | 2.96 | 0.0097 | SEQ ID NO: 1164 |
| 345061 | 70 | 0.89 | 0.86 | 3.08 | 2.92 | 2.65 | 0.0098 | SEQ ID NO: 1165 |
| 345972 | 70 | 0.04 | NaN | NaN | NaN | 2.60 | 0.0099 | SEQ ID NO: 1166 |
| 349045 | 70 | 0.89 | −1.27 | 1.09 | −2.33 | 2.23 | 0.0099 | SEQ ID NO: 1167 |
| 348554 | 70 | 0.89 | −0.94 | −1.30 | 0.02 | 2.64 | 0.0100 | SEQ ID NO: 1168 |
| 349093 | 68 | 0.32 | 0.39 | −3.00 | 0.80 | 2.59 | 0.0100 | SEQ ID NO: 1169 |

A further SNP (SEQ ID NO: 1170) with ident. 245097 located at SCAFFOLD 35329_4726 is also associated with RBY.

### EXAMPLE 8

[0100] An analysis of LDPF (an indicator of meat tenderness) was performed on the same animals and using the same method as previously. The associations identified are set forth in the following tables.

TABLE 28
Associations between DNA markers and meat tenderness sorted in decreasing order of
statistical significance. Locus is the ParAllele identifiers of the polymorphisms, N is
the number of genotypes, mean_0 is the mean meat tenderness for genotype 0, mean_1 is the
mean for genotype 1, and mean_2 is the mean of genotype 2, SD is the standard deviation, a
is the additive effect, k is the dominance effect, alpha is the average effect of allele
substitutions, tmax is the value of the t test, and log(1/P) is the P value determined from
100,000 permutation tests expressed as a positive integer. A minus value for a means the
mean of genotype 0 is lower than the mean of genotype 2, and a minus value for alpha means
that selecting for allele 0 will reduce the average values of tenderness in the population.

| Locus | mean_0 | SD | mean | SD | mean | SD | N | Freq | a | k | alpha | tmax | log(1/P) |
|---|---|---|---|---|---|---|---|---|---|---|---|---|---|
| 352458 | 0.00 | 0.00 | −0.29 | 0.60 | 0.23 | 0.65 | 163 | 0.22 | −0.12 | 3.52 | 0.11 | 7.465 | 5.0000 |
| 354432 | −0.14 | 0.53 | −0.10 | 0.74 | 0.53 | 0.64 | 167 | 0.63 | −0.34 | 0.88 | −0.41 | 7.254 | 4.6990 |
| 350589 | 0.12 | 0.67 | −0.06 | 0.69 | −0.54 | 0.41 | 168 | 0.74 | 0.33 | 0.45 | 0.40 | 7.530 | 4.6990 |
| 343164 | 0.09 | 0.73 | 0.04 | 0.52 | −0.46 | 0.37 | 165 | 0.73 | 0.28 | 0.82 | 0.38 | 7.037 | 4.5230 |
| 350373 | 0.20 | 0.70 | −0.08 | 0.61 | −0.35 | 0.54 | 165 | 0.62 | 0.28 | −0.02 | 0.27 | 6.458 | 4.3980 |
| 344369 | −0.05 | 0.58 | −0.26 | 0.59 | 0.29 | 0.78 | 166 | 0.56 | −0.17 | 2.24 | −0.22 | 6.090 | 4.3010 |
| 344304 | −0.08 | 0.72 | 0.25 | 0.58 | −0.27 | 0.47 | 166 | 0.65 | 0.10 | 4.47 | 0.22 | 6.464 | 4.0970 |
| 346793 | −0.21 | 0.68 | 0.12 | 0.64 | 0.40 | 0.52 | 169 | 0.67 | −0.30 | −0.08 | −0.30 | 6.625 | 3.9210 |
| 354280 | −0.43 | 0.45 | −0.07 | 0.63 | 0.17 | 0.71 | 164 | 0.33 | −0.30 | −0.20 | −0.32 | 6.814 | 3.8240 |
| 352917 | 0.02 | 0.66 | 0.13 | 0.70 | −0.43 | 0.49 | 168 | 0.66 | 0.23 | 1.49 | 0.33 | 6.346 | 3.8240 |
| 349256 | 0.03 | 0.61 | −0.27 | 0.61 | 0.24 | 0.67 | 162 | 0.50 | −0.10 | 3.86 | −0.10 | 5.954 | 3.8240 |
| 353554 | 0.18 | 0.68 | 0.00 | 0.68 | −0.34 | 0.52 | 169 | 0.58 | 0.26 | 0.31 | 0.27 | 6.118 | 3.7700 |
| 348551 | −0.19 | 0.58 | −0.04 | 0.72 | 0.33 | 0.62 | 169 | 0.55 | −0.26 | 0.42 | −0.27 | 5.889 | 3.7450 |
| 350739 | 0.50 | 0.55 | −0.38 | 0.67 | 0.01 | 0.65 | 168 | 0.14 | 0.24 | −2.59 | 0.71 | 6.931 | 3.6580 |
| 349717 | 0.26 | 0.73 | −0.13 | 0.64 | −0.23 | 0.51 | 167 | 0.56 | 0.24 | −0.59 | 0.23 | 5.875 | 3.6380 |
| 349493 | 0.39 | 0.63 | −0.03 | 0.68 | −0.15 | 0.64 | 166 | 0.41 | 0.27 | −0.56 | 0.30 | 5.796 | 3.6380 |
| 348201 | 0.02 | 0.65 | −0.38 | 0.67 | 0.50 | 0.55 | 166 | 0.86 | −0.24 | 2.67 | −0.70 | 6.926 | 3.5850 |
| 348641 | 0.00 | 0.00 | 0.34 | 0.54 | −0.09 | 0.68 | 169 | 0.10 | 0.04 | 8.56 | −0.26 | 5.362 | 3.5090 |
| 352071 | 0.01 | 0.65 | −0.38 | 0.67 | 0.53 | 0.57 | 166 | 0.87 | −0.26 | 2.50 | −0.74 | 6.789 | 3.4810 |
| 351532 | −0.01 | 0.65 | −0.14 | 0.73 | 0.39 | 0.45 | 169 | 0.68 | −0.20 | 1.65 | −0.32 | 6.100 | 3.4090 |
| 352862 | −0.21 | 0.68 | 0.12 | 0.64 | 0.37 | 0.52 | 168 | 0.68 | −0.29 | −0.14 | −0.28 | 6.250 | 3.3570 |
| 350492 | −0.22 | 0.63 | 0.04 | 0.56 | 0.29 | 0.73 | 164 | 0.59 | −0.26 | −0.02 | −0.25 | 5.641 | 3.3370 |
| 345126 | 0.00 | 0.00 | −0.48 | 0.49 | 0.04 | 0.67 | 167 | 0.06 | −0.02 | 25.00 | 0.42 | 5.679 | 3.3280 |
| 348301 | 0.01 | 0.65 | −0.27 | 0.69 | 0.46 | 0.58 | 169 | 0.80 | −0.23 | 2.24 | −0.53 | 6.361 | 3.3100 |
| 345252 | 0.25 | 0.72 | −0.13 | 0.65 | −0.21 | 0.51 | 169 | 0.56 | 0.23 | −0.65 | 0.21 | 5.538 | 3.3100 |
| 349269 | −0.22 | 0.63 | −0.06 | 0.70 | 0.26 | 0.61 | 169 | 0.48 | −0.24 | 0.33 | −0.24 | 5.531 | 3.2920 |
| 350161 | 0.20 | 0.73 | 0.05 | 0.64 | −0.27 | 0.54 | 167 | 0.50 | 0.24 | 0.36 | 0.24 | 5.428 | 3.2600 |
| 346399 | 0.37 | 0.64 | 0.03 | 0.63 | −0.16 | 0.67 | 168 | 0.37 | 0.27 | −0.28 | 0.29 | 5.738 | 3.2600 |
| 345633 | −0.08 | 0.65 | 0.04 | 0.71 | 0.63 | 0.42 | 168 | 0.81 | −0.35 | 0.66 | −0.50 | 6.748 | 3.2370 |
| 350748 | 0.55 | 0.64 | −0.17 | 0.66 | 0.01 | 0.63 | 164 | 0.23 | 0.27 | −1.67 | 0.51 | 6.210 | 3.2010 |
| 345991 | 0.08 | 0.69 | −0.30 | 0.52 | 0.00 | 0.00 | 168 | 0.89 | 0.04 | −8.50 | −0.23 | 4.994 | 3.1940 |
| 345122 | −0.08 | 0.65 | −0.11 | 0.71 | 0.40 | 0.56 | 169 | 0.66 | −0.24 | 1.12 | −0.32 | 5.583 | 3.1800 |
| 347902 | −0.02 | 0.70 | −0.02 | 0.36 | 0.71 | 0.08 | 148 | 0.93 | −0.36 | 1.00 | −0.68 | 10.732 | 3.1430 |
| 346374 | 0.05 | 0.74 | 0.08 | 0.61 | −0.41 | 0.49 | 167 | 0.66 | 0.23 | 1.13 | 0.32 | 5.676 | 3.1250 |
| 351296 | −0.05 | 0.65 | −0.05 | 0.67 | 0.76 | 0.58 | 165 | 0.82 | −0.41 | 1.00 | −0.66 | 6.533 | 3.1250 |
| 351108 | −0.26 | 0.53 | −0.03 | 0.64 | 0.19 | 0.73 | 165 | 0.44 | −0.23 | −0.02 | −0.23 | 5.318 | 3.1020 |
| 343239 | 0.41 | 0.70 | −0.16 | 0.70 | −0.05 | 0.59 | 168 | 0.32 | 0.23 | −1.48 | 0.35 | 5.626 | 3.0920 |
| 346822 | −0.10 | 0.69 | 0.05 | 0.57 | 0.53 | 0.59 | 169 | 0.79 | −0.32 | 0.52 | −0.41 | 5.946 | 3.0810 |
| 346774 | −0.47 | 0.43 | −0.08 | 0.70 | 0.09 | 0.66 | 167 | 0.24 | −0.28 | −0.39 | −0.34 | 6.067 | 3.0600 |
| 353386 | −0.04 | 0.73 | −0.02 | 0.49 | 0.62 | 0.45 | 168 | 0.81 | −0.33 | 0.94 | −0.52 | 6.491 | 3.0510 |
| 350817 | 0.28 | 0.73 | −0.15 | 0.67 | −0.17 | 0.49 | 161 | 0.54 | 0.23 | −0.91 | 0.21 | 5.249 | 3.0510 |
| 350047 | 0.17 | 0.73 | −0.04 | 0.64 | −0.31 | 0.52 | 167 | 0.62 | 0.24 | 0.12 | 0.25 | 5.441 | 3.0460 |
| 352010 | −0.30 | 0.58 | −0.09 | 0.69 | 0.18 | 0.65 | 169 | 0.36 | −0.24 | 0.12 | −0.23 | 5.406 | 3.0270 |
| 350345 | 0.51 | 0.32 | 0.03 | 0.67 | −0.07 | 0.69 | 167 | 0.20 | 0.29 | −0.66 | 0.40 | 6.433 | 3.0220 |
| 352120 | 0.31 | 0.56 | −0.15 | 0.68 | −0.05 | 0.68 | 169 | 0.46 | 0.18 | −1.56 | 0.20 | 5.276 | 3.0040 |
| 344748 | −0.37 | 0.49 | −0.02 | 0.61 | 0.15 | 0.74 | 159 | 0.36 | −0.26 | −0.35 | −0.29 | 5.682 | 3.0000 |
| 344204 | 0.27 | 0.66 | −0.01 | 0.78 | −0.19 | 0.50 | 167 | 0.46 | 0.23 | −0.22 | 0.23 | 5.165 | 2.9910 |
| 344057 | 0.32 | 0.60 | −0.18 | 0.73 | −0.01 | 0.62 | 168 | 0.36 | 0.17 | −2.03 | 0.26 | 5.399 | 2.9630 |
| 352035 | 0.31 | 0.71 | −0.08 | 0.61 | −0.16 | 0.64 | 166 | 0.43 | 0.23 | −0.66 | 0.26 | 5.224 | 2.9470 |
| 351814 | −0.37 | 0.88 | 1.51 | 0.29 | −0.03 | 0.62 | 150 | 0.08 | −0.17 | −10.06 | −1.62 | 9.825 | 2.9470 |
| 351799 | 0.04 | 0.68 | −0.02 | 0.63 | −0.58 | 0.49 | 134 | 0.73 | 0.31 | 0.81 | 0.43 | 5.899 | 2.9470 |
| 353810 | 0.35 | 0.61 | −0.38 | 0.45 | 0.00 | 0.68 | 164 | 0.13 | 0.17 | −3.17 | 0.58 | 6.020 | 2.9320 |
| 347485 | 0.23 | 0.69 | −0.13 | 0.64 | 0.00 | 0.00 | 167 | 0.68 | 0.12 | −2.13 | 0.03 | 4.644 | 2.9240 |
| 344670 | 0.01 | 0.68 | −0.20 | 0.64 | 0.25 | 0.61 | 168 | 0.56 | −0.12 | 2.75 | −0.16 | 5.136 | 2.8270 |
| 346326 | 0.00 | 0.62 | 0.16 | 0.63 | −0.34 | 0.75 | 168 | 0.61 | 0.17 | 1.94 | 0.24 | 5.159 | 2.8210 |
| 351177 | −0.03 | 0.64 | −0.10 | 0.76 | 0.60 | 0.48 | 169 | 0.82 | −0.32 | 1.22 | −0.56 | 6.066 | 2.8180 |
| 344652 | −0.40 | 0.57 | 0.05 | 0.61 | 0.08 | 0.72 | 167 | 0.32 | −0.24 | −0.88 | −0.32 | 5.273 | 2.8180 |
| 352015 | 0.03 | 0.74 | 0.09 | 0.62 | −0.33 | 0.37 | 168 | 0.71 | 0.18 | 1.33 | 0.28 | 5.302 | 2.8120 |
| 345053 | −0.05 | 0.56 | −0.22 | 0.61 | 0.35 | 0.87 | 167 | 0.69 | −0.20 | 1.85 | −0.34 | 5.246 | 2.7960 |
| 349726 | 0.39 | 0.57 | 0.06 | 0.68 | −0.13 | 0.66 | 169 | 0.28 | 0.26 | −0.27 | 0.29 | 5.369 | 2.7900 |
| 352030 | 0.07 | 0.61 | 0.18 | 0.70 | −0.26 | 0.63 | 169 | 0.46 | 0.17 | 1.67 | 0.14 | 5.021 | 2.7700 |
| 345729 | −0.17 | 0.54 | 0.04 | 0.75 | 0.36 | 0.74 | 169 | 0.66 | −0.27 | 0.21 | −0.28 | 5.150 | 2.7670 |
| 350569 | 0.65 | 0.49 | 0.00 | 0.65 | −0.05 | 0.67 | 169 | 0.15 | 0.35 | −0.86 | 0.56 | 6.053 | 2.7590 |
| 349322 | −0.40 | 0.46 | −0.12 | 0.67 | 0.14 | 0.67 | 169 | 0.27 | −0.27 | −0.04 | −0.27 | 5.719 | 2.7570 |
| 350828 | 0.09 | 0.71 | −0.06 | 0.66 | −0.36 | 0.39 | 167 | 0.73 | 0.22 | 0.33 | 0.26 | 5.333 | 2.7470 |
| 354133 | −0.75 | 0.10 | −0.07 | 0.64 | 0.07 | 0.66 | 166 | 0.16 | −0.41 | −0.66 | −0.59 | 11.233 | 2.7420 |
| 351908 | 0.59 | 0.44 | 0.00 | 0.69 | −0.08 | 0.66 | 144 | 0.19 | 0.33 | −0.76 | 0.49 | 6.016 | 2.7280 |
| 349414 | 0.04 | 0.71 | −0.18 | 0.57 | 0.41 | 0.69 | 168 | 0.68 | −0.18 | 2.19 | −0.33 | 5.417 | 2.7140 |
| 347372 | 0.02 | 0.73 | −0.24 | 0.49 | 0.27 | 0.42 | 152 | 0.79 | −0.12 | 3.08 | −0.35 | 5.556 | 2.7060 |
| 352630 | 0.10 | 0.71 | 0.00 | 0.00 | −0.22 | 0.55 | 169 | 0.68 | 0.16 | 0.38 | 0.18 | 4.474 | 2.7010 |
| 345533 | 0.48 | 0.43 | −0.09 | 0.71 | −0.05 | 0.67 | 153 | 0.21 | 0.27 | −1.15 | 0.44 | 5.375 | 2.6880 |
| 345385 | −0.03 | 0.73 | −0.16 | 0.65 | 0.27 | 0.53 | 167 | 0.61 | −0.15 | 1.87 | −0.21 | 4.999 | 2.6880 |
| 352676 | 0.25 | 0.72 | −0.15 | 0.64 | −0.19 | 0.51 | 169 | 0.61 | 0.22 | −0.82 | 0.18 | 5.096 | 2.6860 |
| 352031 | 0.00 | 0.00 | −0.43 | 0.58 | 0.05 | 0.67 | 168 | 0.06 | −0.03 | 18.20 | 0.38 | 4.772 | 2.6700 |
| 351329 | 0.34 | 0.72 | −0.04 | 0.60 | −0.15 | 0.69 | 168 | 0.41 | 0.24 | −0.55 | 0.27 | 4.980 | 2.6540 |
| 349451 | −0.13 | 0.76 | −0.05 | 0.61 | 0.33 | 0.59 | 169 | 0.58 | −0.23 | 0.65 | −0.25 | 4.978 | 2.6520 |
| 350012 | −0.19 | 0.51 | −0.14 | 0.64 | 0.25 | 0.72 | 168 | 0.39 | −0.22 | 0.77 | −0.18 | 5.081 | 2.6440 |
| 348539 | −0.64 | 0.05 | −0.37 | 0.51 | 0.07 | 0.68 | 169 | 0.08 | −0.35 | 0.24 | −0.28 | 9.664 | 2.6420 |
| 352883 | 0.23 | 0.71 | 0.00 | 0.62 | −0.20 | 0.64 | 169 | 0.47 | 0.22 | −0.07 | 0.22 | 4.816 | 2.6330 |
| 353110 | 0.34 | 0.52 | −0.15 | 0.68 | −0.07 | 0.66 | 163 | 0.29 | 0.21 | −1.39 | 0.33 | 5.139 | 2.6290 |
| 353540 | 0.03 | 0.72 | −0.18 | 0.51 | 0.62 | 0.62 | 169 | 0.79 | −0.29 | 1.71 | −0.59 | 6.080 | 2.6220 |
| 347776 | 0.29 | 0.66 | −0.02 | 0.68 | −0.16 | 0.63 | 168 | 0.44 | 0.22 | −0.38 | 0.24 | 4.928 | 2.6180 |
| 347337 | −0.04 | 0.58 | −0.15 | 0.68 | 0.30 | 0.73 | 168 | 0.58 | −0.17 | 1.65 | −0.21 | 4.874 | 2.6090 |
| 345183 | −0.16 | 0.62 | 0.04 | 0.67 | 0.33 | 0.72 | 169 | 0.66 | −0.24 | 0.18 | −0.26 | 4.967 | 2.5990 |
| 347847 | 0.24 | 0.75 | −0.13 | 0.64 | −0.18 | 0.44 | 169 | 0.59 | 0.21 | −0.76 | 0.18 | 4.985 | 2.5900 |
| 345239 | −0.10 | 0.57 | −0.15 | 0.73 | 0.28 | 0.67 | 168 | 0.54 | −0.19 | 1.26 | −0.21 | 4.764 | 2.5800 |
| 349959 | 0.08 | 0.70 | 0.00 | 0.00 | −0.24 | 0.56 | 169 | 0.73 | 0.16 | 0.50 | 0.20 | 4.407 | 2.5700 |
| 351886 | −0.16 | 0.62 | 0.09 | 0.65 | 0.33 | 0.72 | 167 | 0.66 | −0.24 | −0.02 | −0.24 | 4.970 | 2.5650 |
| 350949 | −0.09 | 0.62 | 0.05 | 0.78 | 0.39 | 0.26 | 168 | 0.77 | −0.24 | 0.42 | −0.29 | 5.670 | 2.5510 |
| 350428 | 0.19 | 0.69 | 0.00 | 0.00 | −0.13 | 0.64 | 164 | 0.43 | 0.16 | −0.19 | 0.16 | 4.273 | 2.5470 |
| 351887 | −0.19 | 0.59 | 0.00 | 0.65 | 0.26 | 0.74 | 169 | 0.57 | −0.23 | 0.16 | −0.23 | 4.834 | 2.5420 |
| 346186 | −0.25 | 0.55 | −0.14 | 0.62 | 0.18 | 0.71 | 169 | 0.34 | −0.21 | 0.49 | −0.18 | 4.940 | 2.5360 |
| 353562 | 0.25 | 0.66 | −0.20 | 0.66 | 0.02 | 0.67 | 160 | 0.42 | 0.12 | −2.91 | 0.17 | 4.776 | 2.5300 |
| 343331 | 0.21 | 0.73 | −0.13 | 0.56 | −0.26 | 0.65 | 155 | 0.61 | 0.23 | −0.45 | 0.21 | 4.880 | 2.5300 |
| 347985 | −0.07 | 0.64 | −0.05 | 0.68 | 0.54 | 0.66 | 169 | 0.73 | −0.31 | 0.93 | −0.44 | 5.290 | 2.5240 |
| 351430 | −0.16 | 0.57 | 0.06 | 0.74 | 0.38 | 0.62 | 169 | 0.67 | −0.27 | 0.19 | −0.29 | 5.251 | 2.5240 |
| 350070 | 0.49 | 0.67 | −0.11 | 0.58 | −0.04 | 0.69 | 167 | 0.23 | 0.27 | −1.26 | 0.44 | 5.307 | 2.5190 |
| 349171 | −0.10 | 0.66 | 0.03 | 0.72 | 0.37 | 0.35 | 168 | 0.70 | −0.23 | 0.45 | −0.28 | 5.541 | 2.5160 |
| 352063 | 0.38 | 0.62 | 0.07 | 0.75 | −0.16 | 0.57 | 168 | 0.33 | 0.27 | −0.15 | 0.28 | 5.234 | 2.5140 |
| 345458 | 0.38 | 0.62 | 0.06 | 0.78 | −0.17 | 0.57 | 159 | 0.32 | 0.28 | −0.16 | 0.29 | 5.176 | 2.5130 |
| 351280 | 0.28 | 0.70 | −0.16 | 0.74 | −0.10 | 0.57 | 162 | 0.44 | 0.19 | −1.32 | 0.22 | 4.733 | 2.5090 |
| 347804 | 0.15 | 0.60 | 0.02 | 0.68 | −0.32 | 0.71 | 168 | 0.56 | 0.23 | 0.45 | 0.25 | 4.842 | 2.5060 |
| 349968 | −0.05 | 0.71 | 0.01 | 0.45 | 0.67 | 0.58 | 169 | 0.85 | −0.36 | 0.83 | −0.57 | 5.751 | 2.4950 |
| 345565 | 0.59 | 0.42 | −0.09 | 0.52 | −0.02 | 0.70 | 168 | 0.14 | 0.30 | −1.23 | 0.57 | 6.178 | 2.4890 |
| 350013 | −0.40 | 0.67 | −0.13 | 0.71 | 0.16 | 0.61 | 167 | 0.29 | −0.28 | 0.04 | −0.28 | 5.128 | 2.4810 |
| 349939 | 0.01 | 0.69 | −0.16 | 0.57 | 0.57 | 0.44 | 159 | 0.86 | −0.28 | 1.61 | −0.61 | 6.178 | 2.4810 |
| 348694 | −0.05 | 0.68 | 0.07 | 0.71 | 0.46 | 0.13 | 164 | 0.83 | −0.26 | 0.53 | −0.34 | 6.595 | 2.4740 |
| 346954 | −0.10 | 0.66 | −0.03 | 0.73 | 0.35 | 0.52 | 163 | 0.67 | −0.22 | 0.69 | −0.28 | 4.921 | 2.4710 |
| 346612 | −0.24 | 0.72 | −0.01 | 0.61 | 0.19 | 0.66 | 168 | 0.46 | −0.21 | −0.07 | −0.22 | 4.662 | 2.4660 |
| 351005 | −0.19 | 0.74 | 0.03 | 0.64 | 0.28 | 0.56 | 168 | 0.58 | −0.24 | 0.06 | −0.24 | 4.928 | 2.4630 |
| 354399 | −0.16 | 0.61 | −0.03 | 0.70 | 0.26 | 0.65 | 169 | 0.54 | −0.21 | 0.38 | −0.22 | 4.734 | 2.4610 |
| 351252 | 0.06 | 0.67 | −0.34 | 0.61 | 0.00 | 0.00 | 169 | 0.91 | 0.03 | −12.33 | −0.27 | 4.381 | 2.4530 |
| 344150 | −0.02 | 0.64 | −0.10 | 0.75 | 0.48 | 0.51 | 168 | 0.79 | −0.25 | 1.32 | −0.44 | 5.328 | 2.4520 |
| 343878 | 0.20 | 0.73 | −0.17 | 0.50 | −0.26 | 0.60 | 165 | 0.67 | 0.23 | −0.61 | 0.18 | 4.963 | 2.4510 |
| 353271 | 0.33 | 0.64 | −0.12 | 0.65 | −0.08 | 0.66 | 165 | 0.44 | 0.21 | −1.20 | 0.24 | 4.792 | 2.4510 |
| 352480 | −0.14 | 0.63 | 0.00 | 0.00 | 0.17 | 0.70 | 168 | 0.57 | −0.16 | 0.10 | −0.16 | 4.206 | 2.4420 |
| 344346 | −0.10 | 0.64 | 0.00 | 0.00 | 0.25 | 0.72 | 168 | 0.71 | −0.17 | 0.43 | −0.21 | 4.214 | 2.4410 |
| 345210 | 0.22 | 0.71 | −0.11 | 0.69 | −0.19 | 0.48 | 157 | 0.56 | 0.21 | −0.61 | 0.19 | 4.699 | 2.4390 |
| 345566 | −0.03 | 0.61 | 0.17 | 0.80 | −0.36 | 0.44 | 150 | 0.73 | 0.16 | 2.21 | 0.33 | 5.266 | 2.4330 |
| 353106 | −0.24 | 0.61 | 0.06 | 0.70 | 0.19 | 0.64 | 169 | 0.54 | −0.21 | −0.40 | −0.21 | 4.770 | 2.4280 |
| 353813 | 0.06 | 0.63 | −0.19 | 0.67 | 0.28 | 0.67 | 167 | 0.61 | −0.11 | 3.27 | −0.19 | 4.855 | 2.4270 |
| 352768 | 0.39 | 0.26 | 0.06 | 0.80 | −0.08 | 0.63 | 166 | 0.22 | 0.24 | −0.40 | 0.29 | 5.443 | 2.4260 |
| 353773 | −0.28 | 0.58 | 0.05 | 0.64 | 0.15 | 0.71 | 163 | 0.42 | −0.22 | −0.53 | −0.23 | 4.732 | 2.4210 |
| 354517 | 0.26 | 0.64 | −0.03 | 0.69 | −0.16 | 0.63 | 168 | 0.45 | 0.21 | −0.38 | 0.22 | 4.682 | 2.4170 |
| 349502 | 0.19 | 0.71 | −0.09 | 0.62 | −0.28 | 0.63 | 169 | 0.63 | 0.24 | −0.19 | 0.22 | 4.869 | 2.4150 |
| 348150 | −0.43 | 0.43 | −0.01 | 0.74 | 0.06 | 0.65 | 169 | 0.24 | −0.24 | −0.71 | −0.34 | 5.215 | 2.4130 |
| 345962 | −0.11 | 0.66 | 0.00 | 0.00 | 0.20 | 0.67 | 169 | 0.65 | −0.15 | 0.29 | −0.17 | 4.137 | 2.4110 |
| 347342 | −0.22 | 0.42 | −0.18 | 0.69 | 0.19 | 0.71 | 159 | 0.36 | −0.21 | 0.80 | −0.16 | 4.747 | 2.4100 |
| 351744 | 0.47 | 0.11 | 0.24 | 0.68 | −0.06 | 0.67 | 168 | 0.11 | 0.27 | 0.13 | 0.24 | 6.048 | 2.4080 |
| 346141 | −0.01 | 0.73 | 0.06 | 0.57 | −0.45 | 0.26 | 168 | 0.80 | 0.22 | 1.32 | 0.40 | 6.175 | 2.4050 |
| 352178 | −0.32 | 0.51 | −0.06 | 0.70 | 0.13 | 0.67 | 168 | 0.34 | −0.23 | −0.16 | −0.24 | 4.954 | 2.3980 |
| 350341 | 0.39 | 0.21 | −0.05 | 0.77 | −0.01 | 0.64 | 169 | 0.22 | 0.20 | −1.20 | 0.33 | 5.592 | 2.3900 |
| 354427 | 0.06 | 0.68 | −0.17 | 0.67 | 0.34 | 0.47 | 168 | 0.72 | −0.14 | 2.64 | −0.30 | 5.226 | 2.3820 |
| 349074 | 0.42 | 0.71 | −0.17 | 0.66 | −0.01 | 0.66 | 165 | 0.24 | 0.21 | −1.74 | 0.41 | 5.030 | 2.3770 |
| 354434 | 0.35 | 0.64 | −0.19 | 0.80 | −0.01 | 0.57 | 166 | 0.27 | 0.18 | −2.00 | 0.34 | 4.955 | 2.3650 |
| 354514 | 0.03 | 0.73 | −0.02 | 0.52 | −0.54 | 0.29 | 169 | 0.82 | 0.29 | 0.82 | 0.44 | 6.359 | 2.3570 |
| 346469 | −0.18 | 0.52 | −0.17 | 0.64 | 0.24 | 0.70 | 167 | 0.37 | −0.21 | 0.95 | −0.16 | 4.802 | 2.3540 |
| 351516 | 0.52 | 0.59 | −0.15 | 0.70 | −0.03 | 0.66 | 155 | 0.16 | 0.28 | −1.44 | 0.54 | 5.157 | 2.3480 |
| 353376 | −0.18 | 0.61 | −0.01 | 0.64 | 0.23 | 0.74 | 169 | 0.53 | −0.21 | 0.17 | −0.21 | 4.513 | 2.3450 |
| 349243 | 0.24 | 0.66 | −0.21 | 0.59 | 0.03 | 0.69 | 168 | 0.33 | 0.10 | −3.29 | 0.22 | 4.734 | 2.3410 |
| 351514 | 0.29 | 0.71 | −0.01 | 0.65 | −0.17 | 0.62 | 167 | 0.42 | 0.23 | −0.30 | 0.24 | 4.696 | 2.3340 |
| 351693 | 0.32 | 0.63 | −0.11 | 0.67 | −0.09 | 0.65 | 165 | 0.44 | 0.21 | −1.10 | 0.23 | 4.629 | 2.3330 |
| 347527 | 0.01 | 0.66 | 0.00 | 0.71 | −0.75 | 0.10 | 168 | 0.86 | 0.38 | 0.97 | 0.65 | 9.399 | 2.3330 |
| 344424 | −0.10 | 0.57 | −0.15 | 0.73 | 0.26 | 0.67 | 167 | 0.54 | −0.18 | 1.28 | −0.20 | 4.587 | 2.3330 |
| 354446 | 0.04 | 0.70 | −0.22 | 0.53 | 0.33 | 0.64 | 166 | 0.77 | −0.15 | 2.79 | −0.36 | 4.974 | 2.3280 |
| 352498 | −0.27 | 0.56 | −0.15 | 0.62 | 0.16 | 0.69 | 163 | 0.34 | −0.22 | 0.44 | −0.19 | 4.696 | 2.3240 |
| 352838 | 0.32 | 0.53 | 0.08 | 0.71 | −0.14 | 0.65 | 169 | 0.30 | 0.23 | −0.04 | 0.23 | 4.844 | 2.3220 |
| 351757 | −0.03 | 0.64 | −0.04 | 0.77 | 0.39 | 0.21 | 168 | 0.78 | −0.21 | 1.05 | −0.33 | 5.412 | 2.3080 |
| 348797 | 0.00 | 0.62 | −0.21 | 0.60 | 0.20 | 0.67 | 164 | 0.39 | −0.10 | 3.10 | −0.03 | 4.577 | 2.2960 |
| 350264 | 0.08 | 0.70 | −0.10 | 0.53 | −0.62 | 0.58 | 169 | 0.82 | 0.35 | 0.49 | 0.46 | 5.487 | 2.2920 |
| 349865 | 0.50 | 0.52 | 0.04 | 0.69 | −0.07 | 0.67 | 167 | 0.22 | 0.29 | −0.61 | 0.38 | 5.195 | 2.2920 |
| 351118 | 0.00 | 0.00 | −0.46 | 0.58 | 0.04 | 0.67 | 169 | 0.06 | −0.02 | 24.00 | 0.41 | 4.426 | 2.2910 |
| 343649 | −0.23 | 0.59 | −0.02 | 0.61 | 0.19 | 0.77 | 167 | 0.47 | −0.21 | −0.00 | −0.21 | 4.523 | 2.2870 |
| 348008 | 0.25 | 0.61 | −0.19 | 0.68 | 0.03 | 0.67 | 166 | 0.34 | 0.11 | −3.00 | 0.21 | 4.647 | 2.2740 |
| 350078 | −0.05 | 0.67 | −0.08 | 0.62 | 0.48 | 0.72 | 168 | 0.71 | −0.27 | 1.11 | −0.39 | 4.888 | 2.2680 |
| 347050 | 0.31 | 0.55 | −0.14 | 0.70 | −0.02 | 0.66 | 164 | 0.32 | 0.17 | −1.73 | 0.27 | 4.769 | 2.2580 |
| 348953 | −0.58 | 0.53 | 0.01 | 0.54 | 0.03 | 0.70 | 168 | 0.18 | −0.30 | −0.93 | −0.49 | 5.328 | 2.2570 |
| 342980 | −0.16 | 0.66 | −0.04 | 0.58 | 0.24 | 0.71 | 167 | 0.57 | −0.20 | 0.40 | −0.21 | 4.483 | 2.2560 |
| 349659 | −0.46 | 0.25 | −0.15 | 0.53 | 0.06 | 0.71 | 169 | 0.14 | −0.26 | −0.19 | −0.30 | 6.058 | 2.2540 |
| 354087 | −0.10 | 0.61 | −0.05 | 0.77 | 0.31 | 0.52 | 167 | 0.62 | −0.21 | 0.76 | −0.24 | 4.573 | 2.2520 |
| 342582 | −0.04 | 0.66 | 0.21 | 0.66 | −0.41 | 0.57 | 135 | 0.80 | 0.18 | 2.35 | 0.44 | 5.053 | 2.2520 |
| 347814 | 0.02 | 0.68 | −0.33 | 0.37 | 0.00 | 0.00 | 168 | 0.96 | 0.01 | −34.00 | −0.30 | 4.411 | 2.2510 |
| 347778 | 0.20 | 0.81 | −0.21 | 0.59 | 0.09 | 0.54 | 167 | 0.52 | 0.06 | −6.45 | 0.04 | 4.501 | 2.2450 |
| 344925 | 0.00 | 0.66 | 0.11 | 0.68 | −0.62 | 0.59 | 169 | 0.81 | 0.31 | 1.35 | 0.57 | 5.472 | 2.2450 |
| 351028 | −0.62 | 0.58 | −0.05 | 0.53 | 0.08 | 0.70 | 166 | 0.17 | −0.35 | −0.63 | −0.49 | 5.435 | 2.2440 |
| 349443 | −0.62 | 0.58 | −0.11 | 0.54 | 0.07 | 0.70 | 165 | 0.18 | −0.34 | −0.48 | −0.45 | 5.358 | 2.2440 |
| 343670 | 0.29 | 0.60 | −0.07 | 0.68 | −0.11 | 0.66 | 163 | 0.44 | 0.20 | −0.80 | 0.22 | 4.518 | 2.2420 |
| 344792 | 0.27 | 0.25 | −0.19 | 0.58 | 0.03 | 0.71 | 168 | 0.16 | 0.12 | −2.83 | 0.35 | 5.497 | 2.2410 |
| 349075 | 0.57 | 0.44 | −0.10 | 0.60 | −0.01 | 0.69 | 169 | 0.15 | 0.29 | −1.31 | 0.56 | 5.686 | 2.2250 |
| 350061 | 0.21 | 0.66 | −0.01 | 0.73 | −0.18 | 0.57 | 169 | 0.48 | 0.20 | −0.13 | 0.20 | 4.451 | 2.2240 |
| 343573 | −0.12 | 0.69 | −0.04 | 0.58 | 0.29 | 0.66 | 164 | 0.60 | −0.20 | 0.61 | −0.23 | 4.454 | 2.2180 |
| 348073 | 0.00 | 0.00 | 0.37 | 0.64 | −0.06 | 0.67 | 169 | 0.07 | 0.03 | 13.33 | −0.32 | 4.150 | 2.2160 |
| 351617 | −0.09 | 0.50 | −0.12 | 0.72 | 0.28 | 0.76 | 169 | 0.55 | −0.18 | 1.16 | −0.21 | 4.405 | 2.2100 |
| 343686 | −0.20 | 0.60 | 0.05 | 0.72 | 0.25 | 0.69 | 152 | 0.57 | −0.23 | −0.11 | −0.22 | 4.487 | 2.2080 |
| 347128 | 0.22 | 0.75 | −0.02 | 0.61 | −0.17 | 0.63 | 168 | 0.49 | 0.20 | −0.23 | 0.20 | 4.415 | 2.2060 |
| 345849 | 0.36 | 0.70 | −0.07 | 0.75 | −0.11 | 0.58 | 156 | 0.35 | 0.23 | −0.83 | 0.29 | 4.546 | 2.2030 |
| 348732 | 0.26 | 0.77 | −0.10 | 0.63 | −0.14 | 0.56 | 169 | 0.51 | 0.20 | −0.80 | 0.20 | 4.394 | 2.1970 |
| 344187 | 0.04 | 0.71 | −0.17 | 0.59 | 0.33 | 0.69 | 168 | 0.67 | −0.15 | 2.45 | −0.27 | 4.728 | 2.1940 |
| 353457 | −0.04 | 0.74 | −0.12 | 0.65 | 0.26 | 0.53 | 169 | 0.58 | −0.15 | 1.53 | −0.19 | 4.471 | 2.1930 |
| 348194 | 0.09 | 0.79 | 0.07 | 0.62 | −0.28 | 0.44 | 169 | 0.59 | 0.18 | 0.89 | 0.22 | 4.439 | 2.1920 |
| 348309 | 0.00 | 0.00 | −0.36 | 0.26 | 0.01 | 0.69 | 169 | 0.02 | −0.01 | 73.00 | 0.34 | 4.960 | 2.1910 |
| 342797 | −0.10 | 0.61 | −0.15 | 0.66 | 0.28 | 0.71 | 147 | 0.50 | −0.19 | 1.26 | −0.19 | 4.432 | 2.1880 |
| 347426 | −0.12 | 0.63 | 0.02 | 0.75 | 0.31 | 0.60 | 164 | 0.65 | −0.21 | 0.35 | −0.24 | 4.496 | 2.1870 |
| 348989 | −0.25 | 0.59 | 0.03 | 0.63 | 0.14 | 0.75 | 168 | 0.45 | −0.20 | −0.44 | −0.20 | 4.401 | 2.1820 |
| 345540 | 0.11 | 0.70 | −0.07 | 0.66 | −0.29 | 0.48 | 166 | 0.69 | 0.20 | 0.10 | 0.21 | 4.583 | 2.1820 |
| 351288 | −0.31 | 0.66 | 0.07 | 0.71 | 0.09 | 0.57 | 168 | 0.46 | −0.20 | −0.90 | −0.21 | 4.451 | 2.1800 |
| 350073 | −0.09 | 0.60 | −0.16 | 0.69 | 0.22 | 0.68 | 169 | 0.49 | −0.15 | 1.45 | −0.15 | 4.378 | 2.1780 |
| 349533 | −0.04 | 0.68 | −0.08 | 0.65 | 0.42 | 0.58 | 169 | 0.73 | −0.23 | 1.17 | −0.35 | 4.808 | 2.1740 |
| 347780 | 0.00 | 0.00 | −0.46 | 0.49 | 0.03 | 0.68 | 169 | 0.03 | −0.01 | 31.67 | 0.43 | 4.431 | 2.1730 |
| 353170 | 0.03 | 0.69 | −0.18 | 0.62 | 0.27 | 0.67 | 167 | 0.64 | −0.12 | 2.75 | −0.21 | 4.551 | 2.1700 |
| 346247 | 0.37 | 0.58 | −0.17 | 0.70 | −0.03 | 0.64 | 162 | 0.21 | 0.20 | −1.70 | 0.40 | 4.793 | 2.1690 |
| 353615 | 0.21 | 0.55 | 0.03 | 0.69 | −0.18 | 0.68 | 165 | 0.42 | 0.20 | 0.08 | 0.19 | 4.454 | 2.1660 |
| 349615 | 0.26 | 0.77 | −0.10 | 0.63 | −0.14 | 0.56 | 169 | 0.51 | 0.20 | −0.80 | 0.20 | 4.394 | 2.1660 |
| 349410 | 0.14 | 0.74 | −0.10 | 0.51 | −0.35 | 0.63 | 168 | 0.71 | 0.24 | 0.02 | 0.25 | 4.747 | 2.1600 |
| 348228 | 0.03 | 0.69 | −0.20 | 0.64 | 0.37 | 0.27 | 168 | 0.86 | −0.17 | 2.35 | −0.46 | 5.907 | 2.1570 |
| 349428 | −0.11 | 0.66 | 0.14 | 0.56 | 0.47 | 0.57 | 152 | 0.75 | −0.29 | 0.14 | −0.31 | 5.045 | 2.1560 |
| 348499 | 0.07 | 0.71 | 0.00 | 0.00 | −0.21 | 0.51 | 169 | 0.75 | 0.14 | 0.50 | 0.18 | 3.942 | 2.1540 |
| 348616 | 0.00 | 0.00 | 0.88 | 0.66 | −0.04 | 0.65 | 166 | 0.02 | 0.02 | 45.00 | −0.84 | 5.097 | 2.1500 |
| 344943 | −0.16 | 0.51 | 0.07 | 0.80 | 0.30 | 0.68 | 167 | 0.65 | −0.23 | −0.00 | −0.23 | 4.551 | 2.1500 |
| 353418 | −0.02 | 0.69 | −0.08 | 0.62 | 0.57 | 0.44 | 163 | 0.85 | −0.29 | 1.20 | −0.55 | 5.507 | 2.1460 |
| 350887 | 0.00 | 0.00 | −0.25 | 0.52 | 0.06 | 0.69 | 169 | 0.10 | −0.03 | 9.33 | 0.19 | 3.961 | 2.1460 |
| 352155 | 0.55 | 0.56 | 0.10 | 0.76 | −0.12 | 0.60 | 168 | 0.23 | 0.34 | −0.34 | 0.40 | 5.318 | 2.1440 |
| 350548 | 0.22 | 0.73 | −0.02 | 0.68 | −0.18 | 0.56 | 158 | 0.47 | 0.20 | −0.20 | 0.20 | 4.355 | 2.1420 |
| 343172 | −0.07 | 0.57 | 0.25 | 0.66 | −0.15 | 0.78 | 159 | 0.52 | 0.04 | 9.00 | 0.05 | 4.306 | 2.1400 |
| 344280 | −0.34 | 0.46 | −0.07 | 0.64 | 0.10 | 0.71 | 169 | 0.27 | −0.22 | −0.23 | −0.24 | 4.769 | 2.1390 |
| 347779 | 0.00 | 0.00 | −0.46 | 0.49 | 0.03 | 0.68 | 169 | 0.03 | −0.01 | 31.67 | 0.43 | 4.431 | 2.1380 |
| 351593 | 0.08 | 0.63 | −0.25 | 0.61 | 0.00 | 0.00 | 163 | 0.90 | 0.04 | −7.25 | −0.19 | 3.927 | 2.1370 |
| 352925 | 0.03 | 0.69 | −0.46 | 0.50 | −0.20 | 0.23 | 157 | 0.90 | 0.12 | −3.26 | −0.19 | 5.149 | 2.1370 |
| 350271 | −0.09 | 0.65 | −0.09 | 0.68 | 0.32 | 0.63 | 168 | 0.56 | −0.21 | 1.00 | −0.23 | 4.443 | 2.1350 |
| 354191 | −0.11 | 0.60 | −0.05 | 0.72 | 0.29 | 0.61 | 163 | 0.54 | −0.20 | 0.70 | −0.21 | 4.400 | 2.1310 |
| 353848 | −0.15 | 0.61 | 0.00 | 0.00 | 0.13 | 0.71 | 168 | 0.46 | −0.14 | −0.07 | −0.14 | 3.803 | 2.1280 |
| 349215 | 0.29 | 0.58 | −0.18 | 0.74 | 0.04 | 0.63 | 169 | 0.28 | 0.12 | −2.76 | 0.27 | 4.636 | 2.1270 |
| 347654 | −0.09 | 0.60 | −0.11 | 0.71 | 0.28 | 0.60 | 162 | 0.53 | −0.18 | 1.11 | −0.20 | 4.395 | 2.1270 |
| 351599 | 0.00 | 0.00 | −0.32 | 0.58 | 0.06 | 0.68 | 167 | 0.07 | −0.03 | 11.67 | 0.27 | 3.991 | 2.1260 |
| 348341 | 0.04 | 0.63 | −0.18 | 0.74 | 0.29 | 0.58 | 169 | 0.72 | −0.12 | 2.76 | −0.27 | 4.636 | 2.1230 |
| 351341 | −0.53 | 0.37 | 0.07 | 0.69 | −0.02 | 0.67 | 166 | 0.17 | −0.26 | −1.35 | −0.48 | 5.591 | 2.1190 |
| 348709 | 0.02 | 0.63 | 0.08 | 0.71 | −0.50 | 0.61 | 168 | 0.75 | 0.26 | 1.23 | 0.42 | 4.957 | 2.1190 |
| 345282 | 0.40 | 0.79 | 0.14 | 0.63 | −0.16 | 0.62 | 166 | 0.25 | 0.28 | 0.07 | 0.27 | 4.638 | 2.1190 |
| 350712 | 0.09 | 0.69 | −0.10 | 0.56 | −0.53 | 0.65 | 164 | 0.81 | 0.31 | 0.39 | 0.38 | 4.953 | 2.1170 |
| 347470 | −0.02 | 0.59 | −0.17 | 0.66 | 0.22 | 0.70 | 168 | 0.43 | −0.12 | 2.25 | −0.08 | 4.381 | 2.1170 |
| 344137 | −0.25 | 0.53 | −0.01 | 0.70 | 0.14 | 0.70 | 162 | 0.38 | −0.20 | −0.23 | −0.21 | 4.371 | 2.1160 |
| 351472 | −0.03 | 0.62 | −0.14 | 0.79 | 0.97 | 0.47 | 161 | 0.88 | −0.50 | 1.22 | −0.97 | 6.858 | 2.1150 |
| 351594 | 0.11 | 0.68 | 0.04 | 0.69 | −0.27 | 0.58 | 169 | 0.57 | 0.19 | 0.63 | 0.21 | 4.380 | 2.1140 |
| 348558 | 0.38 | 0.78 | 0.00 | 0.70 | −0.13 | 0.59 | 167 | 0.31 | 0.26 | −0.49 | 0.30 | 4.527 | 2.1140 |
| 344829 | 0.24 | 0.74 | −0.14 | 0.69 | −0.08 | 0.53 | 169 | 0.49 | 0.16 | −1.38 | 0.17 | 4.302 | 2.1120 |
| 344892 | 0.00 | 0.00 | 0.42 | 0.53 | −0.03 | 0.68 | 169 | 0.05 | 0.01 | 29.00 | −0.37 | 4.177 | 2.1060 |
| 348849 | −0.40 | 0.56 | 0.02 | 0.69 | 0.07 | 0.66 | 169 | 0.34 | −0.24 | −0.79 | −0.29 | 4.722 | 2.1050 |
| 348785 | −0.26 | 0.54 | −0.07 | 0.50 | 0.13 | 0.75 | 155 | 0.33 | −0.20 | 0.03 | −0.19 | 4.471 | 2.1030 |
| 344060 | −0.07 | 0.66 | −0.06 | 0.64 | 0.43 | 0.70 | 169 | 0.68 | −0.25 | 0.96 | −0.34 | 4.615 | 2.0990 |
| 353163 | −0.33 | 0.49 | 0.00 | 0.60 | 0.07 | 0.74 | 168 | 0.31 | −0.20 | −0.65 | −0.25 | 4.605 | 2.0970 |
| 349697 | 0.00 | 0.00 | −0.24 | 0.65 | 0.08 | 0.69 | 140 | 0.17 | −0.04 | 7.00 | 0.15 | 3.819 | 2.0970 |
| 344779 | 0.04 | 0.63 | −0.18 | 0.74 | 0.29 | 0.58 | 169 | 0.72 | −0.12 | 2.76 | −0.27 | 4.636 | 2.0960 |
| 342961 | −0.18 | 0.61 | 0.04 | 0.63 | 0.20 | 0.67 | 155 | 0.49 | −0.19 | −0.16 | −0.19 | 4.286 | 2.0930 |
| 349664 | 0.21 | 0.72 | 0.13 | 0.72 | −0.20 | 0.57 | 169 | 0.38 | 0.21 | 0.61 | 0.18 | 4.371 | 2.0920 |
| 349589 | 0.02 | 0.67 | −0.46 | 0.49 | 0.00 | 0.00 | 168 | 0.97 | 0.01 | −47.00 | −0.43 | 4.352 | 2.0870 |
| 352802 | −0.18 | 0.50 | −0.14 | 0.74 | 0.19 | 0.64 | 168 | 0.38 | −0.18 | 0.78 | −0.15 | 4.386 | 2.0870 |
| 351515 | 0.27 | 0.66 | 0.06 | 0.65 | −0.17 | 0.68 | 166 | 0.38 | 0.22 | 0.05 | 0.22 | 4.431 | 2.0820 |
| 349971 | −0.58 | 0.53 | −0.15 | 0.64 | 0.09 | 0.67 | 168 | 0.18 | −0.33 | −0.28 | −0.40 | 5.275 | 2.0810 |
| 348988 | 0.13 | 0.76 | 0.06 | 0.63 | −0.26 | 0.57 | 169 | 0.52 | 0.20 | 0.64 | 0.20 | 4.301 | 2.0800 |
| 344472 | 0.15 | 0.70 | 0.02 | 0.61 | −0.24 | 0.64 | 161 | 0.49 | 0.20 | 0.33 | 0.19 | 4.279 | 2.0790 |
| 350408 | 0.32 | 0.66 | −0.08 | 0.74 | −0.09 | 0.59 | 167 | 0.39 | 0.21 | −0.95 | 0.25 | 4.358 | 2.0780 |
| 349588 | 0.02 | 0.68 | −0.46 | 0.49 | 0.00 | 0.00 | 167 | 0.97 | 0.01 | −47.00 | −0.43 | 4.381 | 2.0780 |
| 352706 | 0.00 | 0.57 | −0.16 | 0.83 | 0.35 | 0.64 | 168 | 0.73 | −0.17 | 1.91 | −0.33 | 4.602 | 2.0770 |
| 350342 | 0.31 | 0.62 | −0.06 | 0.64 | −0.09 | 0.67 | 157 | 0.41 | 0.20 | −0.85 | 0.23 | 4.359 | 2.0730 |
| 350422 | 0.06 | 0.68 | −0.28 | 0.61 | 0.00 | 0.00 | 169 | 0.89 | 0.03 | −10.33 | −0.21 | 3.858 | 2.0730 |
| 346111 | 0.47 | 0.83 | −0.15 | 0.48 | −0.01 | 0.67 | 160 | 0.22 | 0.24 | −1.58 | 0.45 | 4.684 | 2.0730 |
| 350034 | −0.17 | 0.68 | 0.05 | 0.65 | 0.27 | 0.66 | 167 | 0.62 | −0.22 | −0.00 | −0.22 | 4.455 | 2.0700 |
| 354077 | 0.01 | 0.60 | −0.17 | 0.62 | 0.28 | 0.84 | 168 | 0.62 | −0.14 | 2.33 | −0.21 | 4.344 | 2.0690 |
| 349115 | 0.09 | 0.67 | −0.16 | 0.65 | −0.58 | 0.53 | 167 | 0.83 | 0.33 | 0.25 | 0.39 | 5.262 | 2.0680 |
| 348784 | 0.04 | 0.68 | −0.28 | 0.55 | 0.00 | 0.00 | 166 | 0.91 | 0.02 | −15.00 | −0.23 | 3.891 | 2.0670 |
| 343676 | −0.07 | 0.70 | −0.20 | 0.56 | 0.22 | 0.69 | 165 | 0.40 | −0.15 | 1.90 | −0.09 | 4.370 | 2.0650 |
| 344893 | 0.18 | 0.74 | −0.20 | 0.64 | 0.06 | 0.61 | 168 | 0.50 | 0.06 | −5.33 | 0.06 | 4.241 | 2.0640 |
| 348659 | 0.16 | 0.73 | −0.22 | 0.55 | −0.01 | 0.68 | 165 | 0.57 | 0.09 | −3.47 | 0.04 | 4.276 | 2.0620 |
| 348473 | −0.02 | 0.67 | −0.17 | 0.65 | 0.22 | 0.67 | 169 | 0.44 | −0.12 | 2.25 | −0.09 | 4.308 | 2.0570 |
| 347210 | 0.01 | 0.67 | −0.64 | 0.32 | 0.00 | 0.00 | 167 | 0.99 | 0.01 | −129.00 | −0.62 | 6.016 | 2.0550 |
| 353336 | 0.10 | 0.40 | −0.32 | 0.52 | 0.10 | 0.72 | 169 | 0.20 | 0.00 | −420.00 | 0.00 | 4.797 | 2.0530 |
| 343893 | 0.54 | 0.16 | 0.00 | 0.73 | −0.04 | 0.64 | 168 | 0.17 | 0.29 | −0.86 | 0.45 | 7.069 | 2.0460 |
| 347145 | −0.03 | 0.67 | 0.68 | 0.44 | 0.00 | 0.00 | 168 | 0.98 | −0.01 | −46.33 | 0.66 | 5.361 | 2.0450 |
| 348396 | −0.67 | 0.42 | −0.08 | 0.62 | 0.13 | 0.71 | 169 | 0.29 | −0.40 | −0.47 | −0.48 | 6.420 | 2.0380 |
| 346918 | 0.14 | 0.73 | −0.14 | 0.58 | −0.24 | 0.54 | 162 | 0.67 | 0.19 | −0.47 | 0.16 | 4.337 | 2.0370 |
| 348189 | 0.30 | 0.67 | −0.02 | 0.73 | −0.12 | 0.56 | 166 | 0.41 | 0.21 | −0.52 | 0.23 | 4.371 | 2.0370 |
| 346600 | −0.42 | 0.55 | −0.10 | 0.70 | 0.15 | 0.65 | 159 | 0.26 | −0.28 | −0.12 | −0.30 | 4.918 | 2.0340 |
| 348351 | −0.54 | 0.72 | −0.12 | 0.57 | 0.10 | 0.68 | 169 | 0.21 | −0.32 | −0.31 | −0.38 | 4.823 | 2.0330 |
| 346946 | 0.27 | 0.56 | −0.12 | 0.60 | −0.04 | 0.80 | 167 | 0.46 | 0.15 | −1.52 | 0.17 | 4.235 | 2.0330 |
| 354486 | 0.30 | 0.53 | −0.06 | 0.77 | −0.08 | 0.62 | 168 | 0.37 | 0.19 | −0.89 | 0.23 | 4.357 | 2.0280 |
| 345732 | 0.44 | 0.32 | −0.20 | 0.60 | 0.04 | 0.70 | 167 | 0.14 | 0.20 | −2.20 | 0.51 | 6.007 | 2.0250 |
| 352955 | 0.32 | 0.67 | −0.05 | 0.62 | −0.10 | 0.69 | 168 | 0.36 | 0.21 | −0.76 | 0.25 | 4.336 | 2.0250 |
| 349733 | 0.23 | 0.78 | 0.05 | 0.69 | −0.19 | 0.54 | 169 | 0.42 | 0.21 | 0.14 | 0.21 | 4.330 | 2.0250 |
| 348340 | 0.04 | 0.66 | −0.18 | 0.71 | 0.28 | 0.54 | 169 | 0.73 | −0.12 | 2.83 | −0.28 | 4.595 | 2.0240 |
| 349894 | 0.40 | 0.63 | −0.11 | 0.68 | 0.00 | 0.66 | 168 | 0.28 | 0.20 | −1.55 | 0.33 | 4.632 | 2.0230 |
| 344077 | 0.24 | 0.73 | −0.15 | 0.58 | −0.05 | 0.69 | 169 | 0.52 | 0.14 | −1.69 | 0.14 | 4.194 | 2.0210 |
| 347673 | −0.30 | 0.50 | −0.02 | 0.68 | 0.10 | 0.69 | 168 | 0.32 | −0.20 | −0.40 | −0.23 | 4.428 | 2.0200 |
| 350805 | 0.30 | 0.64 | −0.04 | 0.64 | −0.12 | 0.61 | 161 | 0.37 | 0.21 | −0.62 | 0.24 | 4.363 | 2.0180 |
| 354192 | 0.25 | 0.56 | −0.07 | 0.74 | −0.11 | 0.59 | 166 | 0.47 | 0.18 | −0.78 | 0.19 | 4.272 | 2.0150 |
| 348178 | −0.01 | 0.70 | 0.10 | 0.58 | −0.66 | 0.42 | 169 | 0.86 | 0.33 | 1.34 | 0.64 | 5.966 | 2.0140 |
| 352353 | −0.02 | 0.64 | −0.04 | 0.77 | 0.37 | 0.20 | 168 | 0.79 | −0.20 | 1.10 | −0.32 | 5.069 | 2.0130 |
| 345638 | 0.11 | 0.72 | 0.06 | 0.66 | −0.26 | 0.56 | 168 | 0.58 | 0.18 | 0.73 | 0.21 | 4.238 | 2.0110 |
| 353486 | −0.10 | 0.58 | −0.02 | 0.71 | 0.40 | 0.70 | 167 | 0.65 | −0.25 | 0.68 | −0.30 | 4.534 | 2.0090 |
| 350079 | 0.06 | 0.71 | −0.15 | 0.54 | −0.61 | 0.27 | 169 | 0.86 | 0.33 | 0.37 | 0.42 | 6.813 | 2.0040 |
| 351774 | 0.06 | 0.71 | 0.03 | 0.61 | −0.39 | 0.62 | 169 | 0.68 | 0.23 | 0.87 | 0.30 | 4.478 | 2.0020 |
| 353896 | −0.72 | 0.59 | −0.09 | 0.65 | 0.06 | 0.66 | 169 | 0.14 | −0.39 | −0.62 | −0.56 | 5.310 | 2.0010 |

TABLE 29
SNP with the highest probability of being associated with LDPF.

| Ident | scaffold | contig chr. | Comment | | SEQ ID NO: |
|---|---|---|---|---|---|
| 352458 | SCAFFOLD75897_13740 | contig29503 | Hsa13 and Hsa1 Hsa1:CLCA4 to CLCA3, | | 1171 |
| | | | Hsa13:ABCC4 | | |
| 354432 | SCAFFOLD201769_1248 | Contig183125 | no chr. | | 1172 |
| 350589 | IBISS4snp140 | | Hsa4 | HOP transcript 2 | 1173 |
| 343164 | IBISS4snp311 | | Hsa1 | RPL11 | 1174 |
| 350373 | SCAFFOLD319464_327 | contig423442 | no chr. | | 1175 |
| 344369 | SCAFFOLD59697_1625 | contig329859 | Hsa12 | TULP3 intronl | 1176 |
| 344304 | SCAFFOLD323619_6623 | contig84765 | Hsa13 | TRPC4 | 1177 |
| 346793 | SCAFFOLD301627_1872 | contig682939 | Hsa10 | PARD3 | 1178 |
| 354280 | SCAFFOLD195092_4059 | contig52111 | Hsa6 | C6orf32 | 1179 |
| 352917 | SCAFFOLD46051_988 | contig126107 | Hsa18 | LOC390856 to MBD2 transcript1 | 1180 |

The idents are those in Table 28 and are the ParAllele identifiers. These are located on the BGSP scaffolds and contigs which indicate the SNP location. These scaffolds and contigs have been graphically located to maps on the biolives website.

TABLE 30
Parallele identifiers for further SNP associated with LDPF (meat tenderness)
showing the sequence scaffold, the Baylor College of Medicine sequence contig containing
the SNP, the Genbank Accession of the DNA sequence, and the alternative bases for each
SNP. The exact location of each SNP is shown in the sequence scaffold, the number after
the underscore is the exact base pair from the start of the scaffold.

| | | | | | | SEQ ID |
|---|---|---|---|---|---|---|
| ident | Ibiss4 | Sequence scaffold | Baylor Contig | Genbank Accession | SNP bases | NO |
| 342582 | Null | SCAFFOLD281406_2591 | Contig504531 | AAFC01504515 | A/G | 1181 |
| 342961 | Null | SCAFFOLD225832_5442 | Contig260139 | AAFC01260130 | A/G | 1182 |
| 342980 | Null | SCAFFOLD250434_1453 | Contig169120 | AAFC01169114 | C/T | 1183 |
| 343239 | Null | SCAFFOLD105231_4567 | Contig302225 | AAFC01302215 | C/T | 1184 |
| 343331 | Null | SCAFFOLD16085_17354 | Contig7459 | AAFC01007459 | A/T | 1185 |
| 343573 | Null | SCAFFOLD305385_2941 | Contig531782 | AAFC01531761 | C/T | 1186 |
| 343649 | Null | SCAFFOLD51430_8536 | Contig243793 | AAFC01243786 | C/T | 1187 |
| 343670 | Null | SCAFFOLD60719_4788 | Contig149503 | AAFC01149497 | A/G | 1188 |
| 343676 | Null | SCAFFOLD61161_13201 | Contig264651 | AAFC01264642 | A/G | 1189 |
| 343686 | Null | SCAFFOLD70038_5082 | Contig46463 | AAFC01046462 | A/G | 1190 |
| 343878 | Null | SCAFFOLD125630_2793 | Contig459251 | AAFC01459236 | C/G | 1191 |
| 343893 | Null | SCAFFOLD131120_4581 | Contig242406 | AAFC01242399 | G/T | 1192 |
| 344057 | Null | SCAFFOLD206025_18840 | Contig222205 | AAFC01222199 | G/T | 1193 |
| 344060 | Null | SCAFFOLD206561_7073 | Contig55526 | AAFC01055525 | C/T | 1194 |
| 344077 | Null | SCAFFOLD216310_4956 | Contig364044 | AAFC01364034 | C/T | 1195 |
| 344137 | Null | SCAFFOLD246051_2830 | Contig55665 | AAFC01055664 | C/T | 1196 |
| 344150 | Null | SCAFFOLD255245_11962 | Contig229301 | AAFC01229295 | C/T | 1197 |
| 344187 | Null | SCAFFOLD270085_5332 | Contig115177 | AAFC01115173 | G/T | 1198 |
| 344204 | Null | SCAFFOLD275958_4464 | Contig615262 | AAFC01615235 | G/T | 1199 |
| 344280 | Null | SCAFFOLD312466_13255 | Contig174869 | AAFC01174863 | A/G | 1200 |
| 344333 | Null | SCAFFOLD40347_458 | Contig718002 | AAFC01717966 | C/T | 1201 |
| 344346 | Null | SCAFFOLD4869_4182 | Contig139910 | AAFC01139905 | A/G | 1202 |
| 344424 | Null | SCAFFOLD85652_15416 | Contig400086 | AAFC01400073 | G/T | 1203 |
| 344652 | Null | SCAFFOLD150048_24207 | Contig643425 | AAFC01643397 | A/G | 1204 |
| 344670 | Null | SCAFFOLD155146_6104 | Contig422955 | AAFC01422942 | A/G | 1205 |
| 344748 | Null | SCAFFOLD195118_3818 | Contig423383 | AAFC01423370 | A/G | 1206 |
| 344779 | Null | SCAFFOLD205195_11503 | Contig40513 | AAFC01040512 | C/G | 1207 |
| 344792 | Null | SCAFFOLD210723_6215 | Contig7163 | AAFC01007163 | A/G | 1208 |
| 344829 | Null | SCAFFOLD222048_1096 | Contig389034 | AAFC01389022 | C/T | 1209 |
| 344892 | Null | SCAFFOLD245179_12372 | Contig18714 | AAFC01018714 | A/G | 1210 |
| 344893 | Null | SCAFFOLD245179_12153 | Contig18714 | AAFC01018714 | C/T | 1211 |
| 344925 | Null | SCAFFOLD251989_7150 | Contig337247 | AAFC01337237 | C/T | 1212 |
| 344943 | Null | SCAFFOLD26122_11530 | Contig318265 | AAFC01318255 | C/T | 1213 |
| 345053 | Null | SCAFFOLD305765_6934 | Contig54309 | AAFC01054308 | C/T | 1214 |
| 345122 | Null | SCAFFOLD45894_1473 | Contig53062 | AAFC01053061 | A/G | 1215 |
| 345126 | Null | SCAFFOLD50281_6253 | Contig12485 | AAFC01012485 | A/G | 1216 |
| 345183 | Null | SCAFFOLD70038_6516 | Contig267483 | AAFC01267474 | A/G | 1217 |
| 345210 | Null | SCAFFOLD76733_4424 | Contig153419 | AAFC01153413 | C/T | 1218 |
| 345239 | Null | SCAFFOLD85652_15587 | Contig400086 | AAFC01400073 | C/G | 1219 |
| 345252 | Null | SCAFFOLD90222_4388 | Contig57410 | AAFC01057409 | C/T | 1220 |
| 345385 | Null | SCAFFOLD11677_746 | Contig90789 | AAFC01090787 | C/T | 1221 |
| 345458 | Null | SCAFFOLD145703_5662 | Contig294239 | AAFC01294229 | A/G | 1222 |
| 345533 | Null | SCAFFOLD170036_23917 | Contig433770 | AAFC01433756 | C/T | 1223 |
| 345540 | Null | SCAFFOLD170731_17792 | Contig181621 | AAFC01181615 | A/G | 1224 |
| 345565 | Null | SCAFFOLD17903_1783 | Contig307879 | AAFC01307869 | A/G | 1225 |
| 345566 | Null | SCAFFOLD179698_13645 | Contig30125 | AAFC01030125 | A/G | 1226 |
| 345633 | Null | SCAFFOLD20938_6189 | Contig372277 | AAFC01372267 | A/G | 1227 |
| 345638 | Null | SCAFFOLD210185_14270 | Contig691429 | AAFC01691396 | A/G | 1228 |
| 345729 | Null | SCAFFOLD240110_24408 | Contig482987 | AAFC01482971 | A/C | 1229 |
| 345732 | Null | SCAFFOLD240396_5241 | Contig140894 | AAFC01140889 | C/G | 1230 |
| 345849 | Null | SCAFFOLD275605_2672 | Contig307051 | AAFC01307041 | A/G | 1231 |
| 345962 | Null | SCAFFOLD31854_1414 | Contig462699 | AAFC01462684 | G/T | 1232 |
| 345991 | Null | SCAFFOLD37811_702 | Contig273933 | AAFC01273924 | C/G | 1233 |
| 346111 | Null | SCAFFOLD75007_46300 | Contig33428 | AAFC01033427 | A/C | 1234 |
| 346141 | Null | SCAFFOLD86746_2591 | Contig12032 | AAFC01012032 | C/T | 1235 |
| 346247 | Null | SCAFFOLD10637_3753 | Contig143258 | AAFC01143253 | A/G | 1236 |
| 346326 | Null | SCAFFOLD141901_21478 | Contig34060 | AAFC01034059 | A/G | 1237 |
| 346374 | Null | SCAFFOLD160001_65148 | Contig263183 | AAFC01263174 | C/T | 1238 |
| 346399 | Null | SCAFFOLD165339_9908 | Contig111833 | AAFC01111830 | C/T | 1239 |
| 346469 | Null | SCAFFOLD185915_641 | Contig129957 | AAFC01129952 | A/G | 1240 |
| 346600 | Null | SCAFFOLD240058_6183 | Contig699663 | AAFC01699628 | A/C | 1241 |
| 346612 | Null | SCAFFOLD245097_12680 | Contig157834 | AAFC01157828 | C/T | 1242 |
| 346774 | Null | SCAFFOLD296060_5693 | Contig57805 | AAFC01057804 | A/G | 1243 |
| 346822 | Null | SCAFFOLD316847_12816 | Contig299928 | AAFC01299918 | C/T | 1244 |
| 346918 | Null | SCAFFOLD51516_2931 | Contig58742 | AAFC01058741 | C/T | 1245 |
| 346946 | Null | SCAFFOLD60719_8519 | Contig612068 | AAFC01612041 | C/G | 1246 |
| 346954 | Null | SCAFFOLD65896_3481 | Contig35855 | AAFC01035854 | C/T | 1247 |
| 347128 | Null | SCAFFOLD111035_12984 | Contig328357 | AAFC01328347 | C/T | 1248 |
| 347145 | Null | SCAFFOLD120223_9672 | Contig314303 | AAFC01314293 | C/G | 1249 |
| 347210 | Null | SCAFFOLD148828_1609 | Contig613701 | AAFC01613674 | A/G | 1250 |
| 347337 | Null | SCAFFOLD187095_554 | Contig635771 | AAFC01635743 | A/G | 1251 |
| 347342 | Null | SCAFFOLD190009_7530 | Contig28502 | AAFC01028502 | A/G | 1252 |
| 347372 | Null | SCAFFOLD20166_1744 | Contig98654 | AAFC01098652 | C/T | 1253 |
| 347426 | Null | SCAFFOLD216926_3322 | Contig351917 | AAFC01351907 | A/T | 1254 |
| 347470 | Null | SCAFFOLD231191_4220 | Contig279961 | AAFC01279952 | A/G | 1255 |
| 347485 | Null | SCAFFOLD240484_3069 | Contig74857 | AAFC01074856 | C/T | 1256 |
| 347527 | Null | SCAFFOLD25107_13912 | Contig640680 | AAFC01640652 | A/C | 1257 |
| 347654 | Null | SCAFFOLD291032_1968 | Contig416723 | AAFC01416710 | A/G | 1258 |
| 347673 | Null | SCAFFOLD296127_10747 | Contig423557 | AAFC01423544 | A/G | 1259 |
| 347776 | Null | SCAFFOLD36638_9971 | Contig148090 | AAFC01148084 | A/G | 1260 |
| 347778 | Null | SCAFFOLD37383_818 | Contig196420 | AAFC01196414 | C/T | 1261 |
| 347779 | Null | SCAFFOLD378810_561 | Contig448373 | AAFC01448359 | C/T | 1262 |
| 347804 | Null | SCAFFOLD46049_9345 | Contig161626 | AAFC01161620 | G/T | 1263 |
| 347814 | Null | SCAFFOLD50003_7693 | Contig263385 | AAFC01263376 | G/T | 1264 |
| 347847 | Null | SCAFFOLD60365_3678 | Contig608661 | AAFC01608634 | C/G | 1265 |
| 347902 | Null | SCAFFOLD75543_8475 | Contig43828 | AAFC01043827 | A/C | 1266 |
| 348073 | Null | SCAFFOLD110844_5365 | Contig41112 | AAFC01041111 | C/T | 1267 |
| 348150 | Null | SCAFFOLD135781_9137 | Contig555493 | AAFC01555471 | G/T | 1268 |
| 348178 | Null | SCAFFOLD14255_629 | Contig233552 | AAFC01233546 | C/T | 1269 |
| 348189 | Null | SCAFFOLD150363_3636 | Contig419701 | AAFC01419688 | A/G | 1270 |
| 348194 | Null | SCAFFOLD151_26514 | Contig212213 | AAFC01212207 | C/T | 1271 |
| 348201 | Null | SCAFFOLD152968_3124 | Contig433198 | AAFC01433184 | A/C | 1272 |
| 348228 | Null | SCAFFOLD160090_6137 | Contig26096 | AAFC01026096 | A/G | 1273 |
| 348301 | Null | SCAFFOLD195099_8219 | Contig30824 | AAFC01030824 | C/T | 1274 |
| 348309 | Null | SCAFFOLD196149_5586 | Contig46302 | AAFC01046301 | C/T | 1275 |
| 348340 | Null | SCAFFOLD205195_11413 | Contig40513 | AAFC01040512 | A/G | 1276 |
| 348341 | Null | SCAFFOLD205195_11304 | Contig40513 | AAFC01040512 | C/T | 1277 |
| 348351 | Null | SCAFFOLD20608_1008 | Contig661138 | AAFC01661110 | C/T | 1278 |
| 348396 | Null | SCAFFOLD22092_1589 | Contig292776 | AAFC01292766 | C/T | 1279 |
| 348473 | Null | SCAFFOLD251209_4281 | Contig226808 | AAFC01226802 | A/C | 1280 |
| 348499 | Null | SCAFFOLD260149_30694 | Contig339716 | AAFC01339706 | A/G | 1281 |
| 348539 | Null | SCAFFOLD270490_18616 | Contig241741 | AAFC01241734 | A/G | 1282 |
| 348551 | Null | SCAFFOLD275131_13295 | Contig64245 | AAFC01064244 | C/G | 1283 |
| 348558 | Null | SCAFFOLD275605_3060 | Contig307051 | AAFC01307041 | A/G | 1284 |
| 348616 | Null | SCAFFOLD300371_4264 | Contig109810 | AAFC01109807 | A/G | 1285 |
| 348641 | Null | SCAFFOLD310358_3310 | Contig327981 | AAFC01327971 | C/T | 1286 |
| 348659 | Null | SCAFFOLD316954_5829 | Contig232078 | AAFC01232072 | A/G | 1287 |
| 348694 | Null | SCAFFOLD36087_7085 | Contig582871 | AAFC01582847 | A/T | 1288 |
| 348709 | Null | SCAFFOLD40507_5003 | Contig53916 | AAFC01053915 | A/G | 1289 |
| 348732 | Null | SCAFFOLD50174_11362 | Contig23835 | AAFC01023835 | C/T | 1290 |
| 348784 | Null | SCAFFOLD65355_18740 | Contig145890 | AAFC01145884 | C/T | 1291 |
| 348785 | Null | SCAFFOLD65420_8328 | Contig107380 | AAFC01107377 | C/T | 1292 |
| 348797 | Null | SCAFFOLD70054_17340 | Contig359389 | AAFC01359379 | A/G | 1293 |
| 348849 | Null | SCAFFOLD90447_1749 | Contig248746 | AAFC01248738 | A/G | 1294 |
| 348953 | Null | SCAFFOLD115441_12359 | Contig732942 | AAFC01732903 | C/G | 1295 |
| 348988 | Null | SCAFFOLD130401_10619 | Contig120973 | AAFC01120969 | A/G | 1296 |
| 348989 | Null | SCAFFOLD130401_10348 | Contig120973 | AAFC01120969 | A/G | 1297 |
| 349074 | Null | SCAFFOLD15708_919 | Contig240205 | AAFC01240198 | A/G | 1298 |
| 349075 | Null | SCAFFOLD15708_1407 | Contig240205 | AAFC01240198 | C/T | 1299 |
| 349115 | Null | SCAFFOLD172970_4140 | Contig89859 | AAFC01089857 | C/T | 1300 |
| 349171 | Null | SCAFFOLD190769_7723 | Contig57695 | AAFC01057694 | C/T | 1301 |
| 349215 | Null | SCAFFOLD205195_11534 | Contig40513 | AAFC01040512 | G/T | 1302 |
| 349243 | Null | SCAFFOLD215128_19099 | Contig43014 | AAFC01043013 | A/T | 1303 |
| 349256 | Null | SCAFFOLD220358_6604 | Contig268451 | AAFC01268442 | A/G | 1304 |
| 349269 | Null | SCAFFOLD224445_646 | Contig688345 | AAFC01688313 | A/G | 1305 |
| 349322 | Null | SCAFFOLD238086_618 | Contig232761 | AAFC01232755 | A/C | 1306 |
| 349410 | Null | SCAFFOLD266863_5381 | Contig26960 | AAFC01026960 | A/C | 1307 |
| 349414 | Null | SCAFFOLD270085_5213 | Contig115177 | AAFC01115173 | A/G | 1308 |
| 349428 | Null | SCAFFOLD275080_6022 | Contig215992 | AAFC01215986 | A/C | 1309 |
| 349443 | Null | SCAFFOLD280379_15335 | Contig688136 | AAFC01688104 | C/T | 1310 |
| 349451 | Null | SCAFFOLD281769_3791 | Contig125907 | AAFC01125902 | C/T | 1311 |
| 349493 | Null | SCAFFOLD295848_7080 | Contig607587 | AAFC01607560 | A/G | 1312 |
| 349502 | Null | SCAFFOLD300370_3772 | Contig163296 | AAFC01163290 | C/T | 1313 |
| 349533 | Null | SCAFFOLD309057_1002 | Contig95744 | AAFC01095742 | C/T | 1314 |
| 349588 | Null | SCAFFOLD378810_660 | Contig448373 | AAFC01448359 | A/T | 1315 |
| 349615 | Null | SCAFFOLD50174_11664 | Contig23835 | AAFC01023835 | A/G | 1316 |
| 349659 | Null | SCAFFOLD6191_2381 | Contig191832 | AAFC01191826 | C/G | 1317 |
| 349664 | Null | SCAFFOLD65017_15757 | Contig751044 | AAFC01751000 | C/T | 1318 |
| 349697 | Null | SCAFFOLD80193_9585 | Contig510554 | AAFC01510536 | A/G | 1319 |
| 349717 | Null | SCAFFOLD90222_4848 | Contig57410 | AAFC01057409 | G/T | 1320 |
| 349726 | Null | SCAFFOLD91021_7030 | Contig65807 | AAFC01065806 | C/T | 1321 |
| 349733 | Null | SCAFFOLD93276_998 | Contig465924 | AAFC01465909 | A/G | 1322 |
| 349865 | Null | SCAFFOLD130500_11566 | Contig147653 | AAFC01147647 | C/T | 1323 |
| 349894 | Null | SCAFFOLD140160_3611 | Contig99310 | AAFC01099308 | A/G | 1324 |
| 349939 | Null | SCAFFOLD15708_1283 | Contig240205 | AAFC01240198 | G/T | 1325 |
| 349959 | Null | SCAFFOLD165938_4055 | Contig78906 | AAFC01078905 | G/T | 1326 |
| 349968 | Null | SCAFFOLD171671_5714 | Contig42823 | AAFC01042822 | A/T | 1327 |
| 349971 | Null | SCAFFOLD172970_4209 | Contig89859 | AAFC01089857 | C/T | 1328 |
| 350012 | Null | SCAFFOLD185915_514 | Contig129957 | AAFC01129952 | C/T | 1329 |
| 350013 | Null | SCAFFOLD186240_11795 | Contig7154 | AAFC01007154 | A/G | 1330 |
| 350034 | Null | SCAFFOLD193164_742 | Contig583609 | AAFC01583585 | G/T | 1331 |
| 350047 | Null | SCAFFOLD198293_737 | Contig405721 | AAFC01405708 | A/G | 1332 |
| 350061 | Null | SCAFFOLD205065_7733 | Contig650761 | AAFC01650733 | G/T | 1333 |
| 350070 | Null | SCAFFOLD205652_8347 | Contig119996 | AAFC01119992 | A/G | 1334 |
| 350073 | Null | SCAFFOLD205759_10331 | Contig79864 | AAFC01079863 | C/T | 1335 |
| 350078 | Null | SCAFFOLD206561_7143 | Contig55526 | AAFC01055525 | G/T | 1336 |
| 350079 | Null | SCAFFOLD207059_4048 | Contig67434 | AAFC01067433 | A/G | 1337 |
| 350161 | Null | SCAFFOLD245471_31606 | Contig452331 | AAFC01452317 | A/C | 1338 |
| 350264 | Null | SCAFFOLD280379_15411 | Contig688136 | AAFC01688104 | C/T | 1339 |
| 350271 | Null | SCAFFOLD280826_14575 | Contig43533 | AAFC01043532 | A/G | 1340 |
| 350341 | Null | SCAFFOLD310041_20415 | Contig39820 | AAFC01039819 | A/G | 1341 |
| 350342 | Null | SCAFFOLD310106_7051 | Contig250383 | AAFC01250375 | C/T | 1342 |
| 350345 | Null | SCAFFOLD311748_23096 | Contig185112 | AAFC01185106 | G/T | 1343 |
| 350408 | Null | SCAFFOLD36638_10144 | Contig148090 | AAFC01148084 | A/G | 1344 |
| 350422 | Null | SCAFFOLD45483_9360 | Contig200592 | AAFC01200586 | C/G | 1345 |
| 350428 | Null | SCAFFOLD4869_6549 | Contig139910 | AAFC01139905 | C/T | 1346 |
| 350492 | Null | SCAFFOLD70038_4486 | Contig46463 | AAFC01046462 | A/G | 1347 |
| 350548 | Null | SCAFFOLD85346_7303 | Contig118898 | AAFC01118894 | A/C | 1348 |
| 350569 | Null | SCAFFOLD94123_1052 | Contig235275 | AAFC01235268 | C/T | 1349 |
| 350712 | Null | SCAFFOLD141562_8222 | Contig18836 | AAFC01018836 | C/T | 1350 |
| 350739 | Null | SCAFFOLD152968_3192 | Contig433198 | AAFC01433184 | C/G | 1351 |
| 350748 | Null | SCAFFOLD15708_1291 | Contig240205 | AAFC01240198 | A/G | 1352 |
| 350805 | Null | SCAFFOLD180596_2419 | Contig403675 | AAFC01403662 | C/G | 1353 |
| 350817 | Null | SCAFFOLD185915_411 | Contig129957 | AAFC01129952 | A/G | 1354 |
| 350828 | Null | SCAFFOLD190280_13915 | Contig60243 | AAFC01060242 | C/T | 1355 |
| 350887 | Null | SCAFFOLD216607_24732 | Contig3170 | AAFC01003170 | A/C | 1356 |
| 350949 | Null | SCAFFOLD250404_9486 | Contig48271 | AAFC01048270 | C/T | 1357 |
| 351005 | Null | SCAFFOLD266863_5418 | Contig26960 | AAFC01026960 | C/T | 1358 |
| 351028 | Null | SCAFFOLD280379_15364 | Contig688136 | AAFC01688104 | C/T | 1359 |
| 351108 | Null | SCAFFOLD31598_11605 | Contig46911 | AAFC01046910 | A/G | 1360 |
| 351118 | Null | SCAFFOLD317761_5548 | Contig140235 | AAFC01140230 | A/G | 1361 |
| 351177 | Null | SCAFFOLD4277_4756 | Contig147836 | AAFC01147830 | C/T | 1362 |
| 351252 | Null | SCAFFOLD75157_12532 | Contig457294 | AAFC01457280 | A/G | 1363 |
| 351280 | Null | SCAFFOLD85652_15208 | Contig400086 | AAFC01400073 | A/C | 1364 |
| 351288 | Null | SCAFFOLD90097_20876 | Contig169910 | AAFC01169904 | A/G | 1365 |
| 351296 | Null | SCAFFOLD94123_1093 | Contig235275 | AAFC01235268 | A/C | 1366 |
| 351341 | Null | SCAFFOLD100068_6509 | Contig62523 | AAFC01062522 | A/G | 1367 |
| 351430 | Null | SCAFFOLD145703_5870 | Contig294239 | AAFC01294229 | C/G | 1368 |
| 351472 | Null | SCAFFOLD167798_5562 | Contig254281 | AAFC01254273 | G/T | 1369 |
| 351514 | Null | SCAFFOLD192666_11865 | Contig351258 | AAFC01351248 | C/T | 1370 |
| 351515 | Null | SCAFFOLD193164_514 | Contig583609 | AAFC01583585 | A/G | 1371 |
| 351516 | Null | SCAFFOLD195099_7892 | Contig30824 | AAFC01030824 | A/T | 1372 |
| 351532 | Null | SCAFFOLD200558_6470 | Contig20558 | AAFC01020558 | A/C | 1373 |
| 351593 | Null | SCAFFOLD234818_2292 | Contig117676 | AAFC01117672 | C/T | 1374 |
| 351594 | Null | SCAFFOLD235169_2062 | Contig552567 | AAFC01552545 | A/T | 1375 |
| 351599 | Null | SCAFFOLD239395_810 | Contig376366 | AAFC01376356 | A/C | 1376 |
| 351617 | Null | SCAFFOLD250354_2182 | Contig75684 | AAFC01075683 | C/T | 1377 |
| 351693 | Null | SCAFFOLD280826_14537 | Contig43533 | AAFC01043532 | A/T | 1378 |
| 351744 | Null | SCAFFOLD30172_28453 | Contig54331 | AAFC01054330 | A/G | 1379 |
| 351757 | Null | SCAFFOLD310041_20197 | Contig39820 | AAFC01039819 | C/T | 1380 |
| 351774 | Null | SCAFFOLD314614_649 | Contig391685 | AAFC01391673 | C/T | 1381 |
| 351799 | Null | SCAFFOLD324639_528 | Contig686196 | AAFC01686164 | A/G | 1382 |
| 351814 | Null | SCAFFOLD36570_1809 | Contig232548 | AAFC01232542 | A/G | 1383 |
| 351886 | Null | SCAFFOLD70038_4640 | Contig46463 | AAFC01046462 | C/T | 1384 |
| 351887 | Null | SCAFFOLD70038_7077 | Contig267483 | AAFC01267474 | A/G | 1385 |
| 351908 | Null | SCAFFOLD84744_294 | Contig138116 | AAFC01138111 | A/G | 1386 |
| 352010 | Null | SCAFFOLD120898_10475 | Contig344712 | AAFC01344702 | C/T | 1387 |
| 352015 | Null | SCAFFOLD121654_12895 | Contig33470 | AAFC01033469 | A/G | 1388 |
| 352030 | Null | SCAFFOLD125746_1703 | Contig242144 | AAFC01242137 | C/T | 1389 |
| 352031 | Null | SCAFFOLD125755_3155 | Contig543641 | AAFC01543620 | C/G | 1390 |
| 352035 | Null | SCAFFOLD130001_59457 | Contig249594 | AAFC01249586 | A/C | 1391 |
| 352063 | Null | SCAFFOLD145703_5705 | Contig294239 | AAFC01294229 | C/G | 1392 |
| 352071 | Null | SCAFFOLD152968_3080 | Contig433198 | AAFC01433184 | A/G | 1393 |
| 352120 | Null | SCAFFOLD176108_7456 | Contig143077 | AAFC01143072 | A/G | 1394 |
| 352155 | Null | SCAFFOLD200364_14961 | Contig268455 | AAFC01268446 | C/T | 1395 |
| 352178 | Null | SCAFFOLD210854_1158 | Contig387860 | AAFC01387848 | C/T | 1396 |
| 352353 | Null | SCAFFOLD310041_20086 | Contig39820 | AAFC01039819 | A/G | 1397 |
| 352480 | Null | SCAFFOLD86884_422 | Contig572598 | AAFC01572576 | C/G | 1398 |
| 352630 | Null | SCAFFOLD165938_4212 | Contig78906 | AAFC01078905 | A/G | 1399 |
| 352676 | Null | SCAFFOLD185915_226 | Contig129957 | AAFC01129952 | A/G | 1400 |
| 352706 | Null | SCAFFOLD20780_6570 | Contig448610 | AAFC01448596 | A/G | 1401 |
| 352768 | Null | SCAFFOLD250404_9928 | Contig48271 | AAFC01048270 | C/T | 1402 |
| 352802 | Null | SCAFFOLD270318_12392 | Contig333590 | AAFC01333580 | C/T | 1403 |
| 352838 | Null | SCAFFOLD291604_12415 | Contig38390 | AAFC01038389 | A/T | 1404 |
| 352862 | Null | SCAFFOLD301627_1720 | Contig682939 | AAFC01682907 | A/T | 1405 |
| 352883 | Null | SCAFFOLD313308_2790 | Contig451440 | AAFC01451426 | C/T | 1406 |
| 352925 | Null | SCAFFOLD50174_11343 | Contig23835 | AAFC01023835 | A/G | 1407 |
| 352955 | Null | SCAFFOLD68748_1948 | Contig508180 | AAFC01508164 | A/G | 1408 |
| 353106 | Null | SCAFFOLD155476_15944 | Contig79654 | AAFC01079653 | A/G | 1409 |
| 353110 | Null | SCAFFOLD158271_1999 | Contig369257 | AAFC01369247 | C/G | 1410 |
| 353163 | Null | SCAFFOLD198293_824 | Contig405721 | AAFC01405708 | A/T | 1411 |
| 353170 | Null | SCAFFOLD20021_17935 | Contig13105 | AAFC01013105 | C/G | 1412 |
| 353271 | Null | SCAFFOLD280826_14286 | Contig43533 | AAFC01043532 | A/G | 1413 |
| 353336 | Null | SCAFFOLD352562_535 | Contig94850 | AAFC01094848 | A/G | 1414 |
| 353376 | Null | SCAFFOLD68748_2379 | Contig508180 | AAFC01508164 | A/G | 1415 |
| 353386 | Null | SCAFFOLD76639_3861 | Contig334124 | AAFC01334114 | A/G | 1416 |
| 353457 | Null | SCAFFOLD125279_19173 | Contig29410 | AAFC01029410 | A/G | 1417 |
| 353486 | Null | SCAFFOLD147091_1735 | Contig108498 | AAFC01108495 | A/G | 1418 |
| 353540 | Null | SCAFFOLD20021_18293 | Contig13105 | AAFC01013105 | A/C | 1419 |
| 353554 | Null | SCAFFOLD221921_4981 | Contig258191 | AAFC01258182 | A/T | 1420 |
| 353562 | Null | SCAFFOLD235688_5521 | Contig353473 | AAFC01353463 | C/G | 1421 |
| 353615 | Null | SCAFFOLD285455_2244 | Contig237836 | AAFC01237829 | A/G | 1422 |
| 353773 | Null | SCAFFOLD150048_24355 | Contig643425 | AAFC01643397 | A/G | 1423 |
| 353810 | Null | SCAFFOLD195099_8276 | Contig30824 | AAFC01030824 | A/C | 1424 |
| 353813 | Null | SCAFFOLD20021_18112 | Contig13105 | AAFC01013105 | C/T | 1425 |
| 353848 | Null | SCAFFOLD260045_330 | Contig564187 | AAFC01564165 | C/T | 1426 |
| 353896 | Null | SCAFFOLD35672_327 | Contig490593 | AAFC01490577 | C/T | 1427 |
| 354077 | Null | SCAFFOLD40347_337 | Contig718002 | AAFC01717966 | G/T | 1428 |
| 354087 | Null | SCAFFOLD65896_3078 | Contig35855 | AAFC01035854 | A/G | 1429 |
| 354133 | Null | SCAFFOLD152083_9294 | Contig256770 | AAFC01256761 | C/T | 1430 |
| 354191 | Null | SCAFFOLD291032_1734 | Contig416723 | AAFC01416710 | A/T | 1431 |
| 354192 | Null | SCAFFOLD291032_1759 | Contig416723 | AAFC01416710 | A/G | 1432 |
| 354399 | Null | SCAFFOLD65896_3250 | Contig35855 | AAFC01035854 | A/G | 1433 |
| 354427 | Null | SCAFFOLD185006_42127 | Contig29275 | AAFC01029275 | C/G | 1434 |
| 354434 | Null | SCAFFOLD20780_8873 | Contig448610 | AAFC01448596 | A/G | 1435 |
| 354446 | Null | SCAFFOLD289241_10601 | Contig3644 | AAFC01003644 | A/C | 1436 |
| 354486 | Null | SCAFFOLD65896_3125 | Contig35855 | AAFC01035854 | A/C | 1437 |
| 354514 | Null | SCAFFOLD92868_1952 | Contig625847 | AAFC01625819 | A/G | 1438 |
| 354517 | Null | SCAFFOLD131415_1790 | Contig267180 | AAFC01267171 | A/G | 1439 |
| 354499 | Null | SCAFFOLD286022_2896 | Contig353540 | AAFC01353530 | A/C | 1440 |

TABLE 31

SNP associated with LDPF (meat tenderness)
obtained from the IBISS4 database.

| | |
|---|---|
| IBISS4snp154 IBISS4 btcn16717 7/13 404 | T/C |
| AGTGCAAGGCTGGGGGCGAGAGCCTGGCCCACTGGCTTTCATGCAACTTC | Homo sapiens insulin-like |
| GTGAGTCACGCACTGTGCAAATTAAGGCTTCTTATAGGTCGAATGGTCGA | growth factor 2 |
| | receptor (IGF2R), mRNA 3e−25 |
| | (SEQ ID NO:1441) |
| IBISS4snp266 IBISS4 btcn1969 10/19 458 | T/C |
| TGACAGTTAAACACATCTTTTAAAGCATAGACACACATAGAAAAAACATA | Homo sapiens PEST-containing |
| GGTATAATGATTTCCTTGAAGACTACAATGTTAGATTTGGAGGCAGCTTC | nuclear protein (PCNP), |
| | mRNA 1e−110 |
| | (SEQ ID NO:1442) |
| IBISS4snp297 IBISS4 btcn20629 5/11 1188 | C/T |
| CTTTAAGACATGGCTTACTTTACCTCACTATCAATGGAGGGAGAAAGGAA | Homo sapiens a disintegrin-like |
| GCACATGGGATCTTTGACCATCACTTTACCCGCTGCTATGGTTTCAGAGA | and metalloprotease (reprolysin |
| | type) with thrombospondin |
| | type 1 motif, 1 (ADAMTS1), |
| | mRNA 1e−162 |
| | (SEQ ID NO:1443) |
| IB1SS4snp298 IBISS4 btcn20629 6/11 1379 | A/G |
| CCTCTCTTGTGTCGTTATTATGTCTTTCTTTGTGAATTCCTTTTGACGAA | Homo sapiens a disintegrin-like |
| AAACAATTGCATGTATTTGTAAACACACCATAAATTCTACAAGGGGAAAA | and metalloprotease (reprolysin |
| | type) with thrombospondin |
| | type 1 motif, 1 (ADAMTS1), |
| | mRNA 1e−162 |
| | (SEQ ID NO:1444) |
| IBISS4snp343 IBISS4 btcn22113 7/12 108 | A/G |
| CAAGGAAGCTGAGTCCACTCAACTAGAAGAGAGCGAAGACA | Homo sapiens OCIA domain |
| AGGTCATCATGGCTTCAGTGTCCACACATGAAAACCAAGAA | containing 2 (OCIAD2), mRNA 1e−87 |
| | (SEQ ID NO:1445) |
| IBISS4snp371 IBISS4 btcn23O4 7/12 1623 | C/T |
| GATTAGTTTAACGAGACTTAACTGTTCCCACCTAAGACTGTCAGAGGGAG | Homo sapiens thioredoxin-like 1 |
| ACAGATTTGATACCCTTTTGGATAGACTTAAAACTTGAGTCATCTTTATC | (TXNL1), mRNA 0.0 |
| | (SEQ ID NO:1446) |
| IBISS4snp404 IBISS4 btcn23970 21/34 1271 | G/T |
| ACTTGATCAACTTAATTCCTTTTCTTTATCTTCCCTCCCTCACTCCCCTT | Homo sapiens actin related |
| CCTGCCCCTTCTTTTCCAAGCTGTTTTGCTTTGCAATATGTTACTGGTAA | protein 2/3 complex, subunit |
| | 2, 34kDa (ARPC2), transcript |
| | variant 1, mRNA 0.0 |
| | (SEQ ID NO:1447) |
| IBISS4snp483 IBISS4 btcn26603 18/31 851 | T/C |
| GAGTTCTTGAGCTTTGCCGAAAGGTACCCTACCATCGTCTATAACATCCT | Homo sapiens solute carrier |
| CTCTTTGGCCTGACTAGTGCCCTGGGCCAG | family 35, member B1 |
| | (SLC35B1), mRNA 0.0 |
| | (SEQ ID NO:1448) |
| IBISS4snp695 IBISS4 btcn34762 6/10 932 | G/A |
| TGACTGCCTTCTCTGCAGGTTGAAGCCCAGAGCTTTAATTATTCGTATGC | Homo sapiens aldehyde |
| GCTATGATAGATAGCATTTTACTTGAATAATATTTATGCTGTGGTTTTTT | dehydrogenase 5 family, member |
| | A1 (succinate-semialdehyde |
| | dehydrogenase) (ALDH5A1), |
| | nuclear gene encoding |
| | mitochondrial protein, |
| | transcript variant 1, mRNA 1e−06 |
| | (SEQ ID NO: 1449) |
| IBISS4snp941 IBISS4 btcn53153 7/12 573 | T/C |
| TATAATCCTCGAATCCAGGAGATCCAAGTTGTCAAATTAGAGAAACGGCT | Homo sapiens mitochondrial |
| GACGATAGTTTGCTGTACTTGCGAGATGCCCTTCCTGAATACAGCACTTT | ribosomal protein L19 (MRPL19), |
| | nuclear gene encoding |
| | mitochondrial protein, mRNA 0.0 |
| | (SEQ ID NO:1450) |
| IBISS4snp989 IBISS4 btcn6326 9/16 212 | T/C |
| CAGCTCCGGCTCTCAGCCTGTCTGCATCGCCCCCCTCCTCCCGGATCCTG | Homo sapiens creatine kinase, |
| CCTGAGCCAGCAGCTCCTGCCCTGAGATTCCGTAGGCAGACCCTCAAGCC | mitochondrial 1 (ubiquitous) (CKMT1), |
| | nuclear gene encoding mitochondrial |
| | protein, mRNA 0.0 |
| | (SEQ ID NO:1451) |

### EXAMPLE 9

[0101] To find additional loci affecting meat tenderness, further analyses of the whole genome SNP scan were performed. First, the LDPF trait values for all measured individuals, not just the 189 in the whole genome scan, were adjusted using the model ldpf ˜ mu herd kill_group age ! sireid using ASREML. The residual LDPF phenotypes were then available for further analysis. The means and standard errors of the residual LDPF for each genotype in the whole genome scan were calculated and at test computed for each comparison. The statistical significance of the largest mean difference was calculated using 100,000 permutations.

TABLE 32
A set of loci with high levels of support
associated with residual meat tenderness.

| | scaffold- | | | | | SEQ ID |
|---|---|---|---|---|---|---|
| Snp_id | v2 | bp | scaffold-v1 | Hsa | Gene | NO |
| 344371 | Un.2692 | 15944 | SCAFFOLD6014_7952 | 2 | no gene near | 1452 |
| 348385 | Un.3082 | 36364 | SCAFFOLD220007_32473 | 4 | no gene near | 1453 |
| 350387 | 25.18 | 276632 | SCAFFOLD325320_4318 | 16 | LOC283953 | 1454 |
| | | | | | expressed gene | |
| 354161 | Un.3082 | 36240 | SCAFFOLD220007_32349 | 4 | no gene near | 1455 |
| 348956 | 23.13 | 800901 | SCAFFOLD116028_5928 | 7 | ICA1 islet cell | 1456 |
| | | | | | autoantigen 1 | |
| 348835 | 4.126 | 328465 | SCAFFOLD86728_4181 | 7 | near SLC25A30 | 1457 |
| | | | | | solute carrier | |
| | | | | | family 25 member | |
| | | | | | A30 | |
| 354228 | Un.2727 | 71680 | SCAFFOLD75727_10291 | 5 | no gene near | 1458 |
| 347398 | 23.88 | 1235214 | SCAFFOLD210862_10205 | 6 | near SLC35B3 | 1459 |
| | | | | | solute carrier | |
| | | | | | family 35 member | |
| | | | | | B3 | |
| 353710 | Un.1242 | 162535 | SCAFFOLD90782_1366 | 5? | near predicted | 1460 |
| | | | | | gene like | |
| | | | | | LOC513860 | |
| | | | | | hypothetical | |
| | | | | | protein similar to | |
| | | | | | reverse | |
| | | | | | transcriptase-like | |
| 349108 | Un.5136 | 27731 | SCAFFOLD171014_5604 | 7 | no gene near | 1461 |

Snp_id is the ParAllele SNP identifier,
scaffold-v2 is the version 2 scaffold,
bp is the location of the SNP in the scaffold,
scaffold-v1/IBISS4 gives a direct reference to the SNP,
Hsa is the human chromosome associated with the SNP and
Gene is the closest gene to the SNP.

TABLE 33
Associations between DNA markers and meat tenderness sorted in decreasing order
of statistical significance.

| snp_id | scaffold-v2 | bp | bases | | mean0 | SE | mean1 | SE | mean2 |
|---|---|---|---|---|---|---|---|---|---|
| 344371 | Un.2692 | 15944 | C/T | 344371 | 0.56 | 0.17 | −0.06 | 0.08 | −0.05 |
| 348385 | Un.3082 | 36364 | A/G | 348385 | 0.26 | 0.08 | 0.10 | 0.13 | −0.16 |
| 348956 | 23.13 | 800901 | C/G | 348956 | −0.09 | 0.06 | 0.24 | 0.08 | −0.16 |
| 350387 | 25.18 | 276632 | A/G | 350387 | 0.21 | 0.12 | −0.25 | 0.09 | 0.10 |
| 354161 | Un.3082 | 36240 | C/T | 354161 | −0.14 | 0.06 | 0.25 | 0.08 | 0.07 |
| 347398 | 23.88 | 1235214 | G/T | 347398 | −0.12 | 0.06 | 0.21 | 0.07 | −0.04 |
| 348835 | 4.126 | 328465 | C/T | 348835 | 0.02 | 0.05 | 0.08 | 0.13 | −0.89 |
| 354228 | Un.2727 | 71680 | A/G | 354228 | −0.09 | 0.06 | 0.32 | 0.11 | −0.05 |
| 349108 | Un.5136 | 27731 | C/T | 349108 | 0.08 | 0.05 | −0.39 | 0.08 | −0.15 |
| 353710 | Un.1242 | 162535 | A/T | 353710 | 0.03 | 0.05 | 0.05 | 0.09 | −0.70 |

| snp_id | SE | N | Freq | a | k | a | tmax | PermP | SEQ ID NO: |
|---|---|---|---|---|---|---|---|---|---|
| 344371 | 0.05 | 168 | 0.25 | 0.31 | −1.04 | 0.46 | 4.04 | 0.0000 | 1452 |
| 348385 | 0.06 | 142 | 0.43 | 0.21 | 0.26 | 0.20 | 4.43 | 0.0000 | 1453 |
| 348956 | 0.09 | 168 | 0.77 | 0.03 | 10.93 | 0.23 | 3.41 | 0.0000 | 1456 |
| 350387 | 0.05 | 168 | 0.20 | 0.06 | −7.25 | 0.30 | 3.48 | 0.0000 | 1454 |
| 354161 | 0.11 | 168 | 0.73 | −0.11 | −2.70 | 0.03 | 4.06 | 0.0000 | 1455 |
| 347398 | 0.13 | 168 | 0.74 | −0.04 | −7.09 | 0.10 | 3.49 | 0.0001 | 1459 |
| 348835 | 0.37 | 164 | 0.89 | 0.45 | 1.14 | 0.85 | 3.72 | 0.0001 | 1457 |
| 354228 | 0.09 | 155 | 0.67 | −0.02 | −18.90 | 0.11 | 3.34 | 0.0001 | 1458 |
| 349108 | 0.30 | 168 | 0.91 | 0.11 | −3.07 | −0.17 | 3.72 | 0.0002 | 1461 |
| 353710 | 0.21 | 167 | 0.87 | 0.37 | 1.05 | 0.65 | 3.46 | | 1460 |

Locus is the ParAllele identifiers of the polymorphisms,
N is the number of genotypes, mean_0 is the mean meat tenderness for genotype 0,
mean_1 is the mean for genotype 1, and
mean_2 is the mean of genotype 2,
SE is the standard error,
a is the additive effect,
k is the dominance effect,
alpha is the average effect of allele substitutions,
tmax is the value of the t test, and
PermP is the P value determined from 100,000 permutation tests expressed as a positive integer.
A minus value for a means the mean of genotype 0 is lower than the mean of genotype 2 and a minus value for alpha means that selecting for allele 0 will reduce the average values of meat tenderness in the population.
Scaffold-v2 is the Draft version 2 Bovine genome sequence,
bp is the location in base pairs in the scaffold, and
bases are the alternative bases

TABLE 34
Associations between DNA markers and meat tenderness sorted in decreasing order
of statistical significance.

| snp_id | scaffold-v2 | bp | bases | | mean0 | SE | mean1 | SE | mean2 |
|---|---|---|---|---|---|---|---|---|---|
| 344295 | 19.45 | 215847 | C/T | 344295 | 0.18 | 0.07 | −0.17 | 0.06 | 0.03 |
| 347447 | 8.125 | 303271 | A/T | 347447 | 0.93 | 0.26 | 0.02 | 0.08 | −0.03 |
| 352858 | Un.3226 | 26597 | A/G | 352858 | −0.34 | 0.60 | 1.05 | 0.29 | −0.01 |
| 347467 | 13.11 | 127806 | C/T | 347467 | −0.23 | 0.07 | 0.25 | 0.08 | −0.08 |
| 349904 | Un.3560 | 28939 | A/T | 349904 | −0.03 | 0.07 | −1.06 | 0.52 | 0.07 |
| 344183 | 9.47 | 71878 | A/T | 344183 | −0.24 | 0.06 | −0.34 | 0.09 | 0.08 |
| 345548 | Un.1972 | 60288 | A/G | 345548 | −0.56 | 0.21 | 0.08 | 0.07 | 0.02 |
| 351609 | Un.7793 | 21627 | C/T | 351609 | 1.06 | 0.28 | 0.07 | 0.15 | −0.01 |
| 350871 | NULL | NULL | C/T | 350871 | 0.17 | 0.15 | 0.23 | 0.09 | −0.09 |
| 350305 | 15.71 | 229708 | C/T | 350305 | 0.06 | 0.10 | 0.16 | 0.07 | −0.19 |
| 343608 | Un.2073 | 135761 | A/G | 343608 | −0.15 | 0.10 | 0.24 | 0.09 | −0.06 |
| 350930 | Un.7793 | 21344 | C/T | 350930 | 1.06 | 0.28 | 0.07 | 0.15 | −0.03 |
| 347497 | Un.7793 | 21278 | G/T | 347497 | 1.06 | 0.28 | 0.07 | 0.15 | −0.03 |
| 342489 | Un.100 | 270891 | C/G | 342489 | −0.02 | 0.06 | 0.18 | 0.08 | −0.52 |
| 347190 | 25.67 | 602153 | A/G | 347190 | 0.01 | 0.08 | 0.15 | 0.06 | −0.18 |
| 349724 | Un.1242 | 162777 | C/T | 349724 | −0.70 | 0.21 | 0.03 | 0.08 | 0.04 |
| 348335 | 4.106 | 238981 | A/T | 348335 | −0.11 | 0.12 | 0.23 | 0.09 | −0.08 |
| 346457 | 1.69 | 764055 | C/T | 346457 | 0.10 | 0.05 | −0.21 | 0.08 | 0.06 |
| 346899 | 5.146 | 420627 | A/C | 346899 | −0.14 | 0.13 | 0.21 | 0.08 | −0.07 |
| 354051 | 15.71 | 230123 | A/G | 354051 | −0.19 | 0.07 | 0.16 | 0.07 | 0.04 |
| 344214 | 11.153 | 822417 | G/T | 344214 | 0.00 | 0.08 | 0.12 | 0.06 | −0.27 |
| 345920 | 1.265 | 40312 | A/G | 345920 | 0.02 | 0.07 | −0.13 | 0.06 | 0.24 |
| 350159 | Un.7793 | 21323 | A/G | 350159 | 1.06 | 0.28 | 0.07 | 0.15 | −0.03 |
| 352489 | 24.82 | 100372 | A/C | 352489 | −0.05 | 0.05 | 0.33 | 0.13 | 0.11 |
| 353900 | Un.351 | 230754 | A/T | 353900 | 0.06 | 0.05 | −0.30 | 0.12 | NaN |
| 354010 | Un.3725 | 48688 | A/T | 354010 | −0.53 | 0.20 | 0.12 | 0.10 | 0.02 |
| 348544 | 8.128 | 88667 | A/G | 348544 | 0.02 | 0.05 | 0.09 | 0.13 | −0.63 |
| 347844 | 3.171 | 110891 | C/T | 347844 | −0.09 | 0.05 | 0.21 | 0.09 | 0.28 |
| 348208 | 2.93 | 1121519 | A/C | 348208 | −0.28 | 0.14 | 0.18 | 0.07 | −0.07 |
| 344568 | 23.13 | 720587 | C/T | 344568 | 0.04 | 0.04 | −0.48 | 0.22 | −0.06 |
| 346260 | 23.13 | 720405 | C/T | 346260 | 0.04 | 0.04 | −0.48 | 0.22 | −0.06 |
| 346803 | 11.153 | 1473417 | C/T | 346803 | −0.17 | 0.07 | 0.14 | 0.07 | 0.11 |
| 345870 | Un.4101 | 41739 | A/T | 345870 | −0.22 | 0.09 | 0.08 | 0.08 | 0.11 |
| 349884 | 24.42 | 281842 | A/G | 349884 | −0.01 | 0.04 | 0.00 | 0.17 | 0.85 |
| 351830 | Un.240 | 189153 | A/G | 351830 | 0.08 | 0.06 | 0.05 | 0.07 | −0.31 |
| 352396 | Un.240 | 189053 | C/T | 352396 | −0.31 | 0.12 | 0.05 | 0.07 | 0.08 |
| 343102 | 20.77 | 1004580 | A/G | 343102 | −0.10 | 0.06 | 0.05 | 0.08 | 0.25 |
| 346207 | 21.26 | 732301 | C/T | 346207 | −0.40 | 0.16 | 0.07 | 0.07 | 0.02 |
| 346237 | 23.44 | 302124 | A/G | 346237 | −0.16 | 0.08 | 0.12 | 0.07 | 0.06 |
| 346881 | Un.240 | 189525 | C/T | 346881 | −0.31 | 0.12 | 0.05 | 0.07 | 0.08 |
| 349455 | Un.142 | 17692 | A/G | 349455 | −0.06 | 0.05 | 0.29 | 0.09 | −0.30 |
| 354162 | Un.3082 | 36175 | G/T | 354162 | 0.02 | 0.14 | 0.21 | 0.08 | −0.09 |
| 345666 | 12.13 | 232214 | A/G | 345666 | 0.20 | 0.07 | −0.05 | 0.08 | −0.08 |
| 347009 | 4.114 | 46740 | A/G | 347009 | 0.03 | 0.07 | 0.08 | 0.07 | −0.29 |
| 348378 | 12.13 | 231913 | C/T | 348378 | 0.20 | 0.07 | −0.05 | 0.08 | −0.08 |
| 342943 | NULL | NULL | C/T | 342943 | 0.08 | 0.06 | −0.01 | 0.08 | −0.33 |
| 347933 | 19.124 | 83735 | A/C | 347933 | NaN | NaN | −0.43 | 0.17 | 0.05 |
| 347783 | 11.173 | 210242 | A/T | 347783 | 0.33 | 0.15 | 0.05 | 0.08 | −0.07 |
| 351157 | 6.133 | 323039 | A/T | 351157 | 0.91 | 0.35 | 0.07 | 0.09 | −0.04 |
| 348153 | 24.42 | 282071 | C/T | 348153 | −0.01 | 0.04 | 0.04 | 0.18 | 0.85 |
| 345455 | 6.141 | 521629 | A/C | 345455 | −0.18 | 0.10 | −0.10 | 0.10 | 0.15 |
| 351473 | 11.163 | 280847 | A/G | 351473 | 0.25 | 0.12 | 0.20 | 0.11 | −0.11 |
| 349248 | 12.13 | 231848 | A/T | 349248 | −0.08 | 0.07 | −0.05 | 0.08 | 0.20 |
| 351790 | Un.7299 | 10550 | A/C | 351790 | 0.07 | 0.06 | −0.21 | 0.09 | 0.26 |
| 347189 | 24.42 | 284365 | A/T | 347189 | 0.85 | 0.39 | 0.07 | 0.15 | −0.02 |
| 343732 | 29.102 | 498923 | A/G | 343732 | 0.29 | 0.12 | 0.03 | 0.09 | −0.06 |
| 344074 | 12.13 | 231935 | C/T | 344074 | −0.08 | 0.07 | −0.04 | 0.09 | 0.18 |
| 343015 | 11.153 | 822202 | C/T | 343015 | −0.24 | 0.10 | 0.10 | 0.07 | 0.00 |
| 349117 | Un.12818 | 12771 | A/G | 349117 | −0.02 | 0.07 | −0.09 | 0.07 | 0.27 |
| 351241 | 8.66 | 160865 | C/T | 351241 | 0.06 | 0.24 | −0.19 | 0.09 | 0.08 |
| 352073 | 2.74 | 231913 | A/G | 352073 | 0.04 | 0.12 | −0.13 | 0.05 | 0.15 |
| 346121 | Un.3146 | 10954 | A/T | 346121 | 0.15 | 0.07 | −0.15 | 0.07 | −0.02 |
| 348916 | 23.44 | 301948 | G/T | 348916 | −0.19 | 0.08 | 0.11 | 0.07 | 0.04 |
| 351544 | Un.16047 | 5152 | C/T | 351544 | −0.01 | 0.05 | 0.16 | 0.09 | −0.37 |
| 352834 | 18.63 | 185411 | A/G | 352834 | −0.41 | 0.11 | −0.35 | 0.12 | 0.08 |
| 344400 | 1.57 | 71230 | C/T | 344400 | 0.10 | 0.06 | −0.17 | 0.07 | 0.17 |
| 343146 | Un.5180 | 45826 | A/T | 343146 | 0.07 | 0.05 | −0.24 | 0.10 | −0.06 |
| 344529 | 19.113 | 545504 | C/T | 344529 | −0.09 | 0.06 | 0.18 | 0.08 | −0.02 |
| 349950 | Un.6970 | 27673 | C/T | 349950 | 0.05 | 0.08 | 0.12 | 0.07 | −0.16 |
| 343712 | 9.111 | 1158162 | A/G | 343712 | 0.42 | 0.18 | 0.04 | 0.09 | −0.05 |
| 343738 | 14.116 | 14890 | C/T | 343738 | −0.07 | 0.05 | 0.20 | 0.08 | −0.16 |
| 343747 | 21.26 | 733216 | A/G | 343747 | −0.01 | 0.06 | 0.07 | 0.07 | −0.40 |
| 346307 | 20.77 | 286925 | C/T | 346307 | −0.24 | 0.09 | 0.09 | 0.07 | 0.05 |
| 347494 | Un.2612 | 14892 | C/T | 347494 | 0.07 | 0.06 | −0.21 | 0.08 | 0.20 |
| 350337 | 1.265 | 40249 | C/T | 350337 | 0.24 | 0.12 | −0.11 | 0.07 | 0.02 |
| 353281 | 10.98 | 96423 | A/G | 353281 | 0.06 | 0.16 | 0.19 | 0.08 | −0.08 |
| 351998 | 10.95 | 27011 | C/T | 351998 | 0.01 | 0.07 | 0.12 | 0.07 | −0.20 |
| 342821 | Un.1309 | 130852 | C/T | 342821 | −0.35 | 0.14 | 0.07 | 0.07 | 0.04 |
| 352336 | 20.46 | 162047 | A/T | 352336 | 0.13 | 0.06 | −0.14 | 0.06 | −0.15 |
| 354185 | Un.4101 | 41624 | C/T | 354185 | 0.08 | 0.07 | 0.10 | 0.07 | −0.21 |
| 347765 | 19.3 | 387941 | C/T | 347765 | 0.03 | 0.05 | 0.08 | 0.10 | −0.41 |
| 350772 | 29.22 | 353481 | C/T | 350772 | 0.10 | 0.05 | −0.11 | 0.09 | −0.44 |
| 349872 | Un.555 | 229185 | A/G | 349872 | 0.40 | 0.14 | −0.03 | 0.11 | −0.03 |
| 352390 | Un.351 | 230899 | A/G | 352390 | 0.06 | 0.05 | −0.28 | 0.12 | 0.27 |
| 350508 | 9.28 | 508356 | A/G | 350508 | −0.30 | 0.13 | 0.11 | 0.08 | 0.03 |
| 351413 | 24.42 | 282006 | C/T | 351413 | −0.01 | 0.04 | 0.04 | 0.19 | 0.85 |
| 346375 | 7.42 | 254403 | A/G | 346375 | −0.01 | 0.16 | 0.18 | 0.08 | −0.08 |
| 346361 | 19.42 | 1952799 | C/T | 346361 | 0.05 | 0.06 | −0.13 | 0.07 | 0.32 |
| 348493 | Un.1207 | 26097 | C/T | 348493 | 0.14 | 0.09 | −0.16 | 0.06 | 0.05 |
| 350213 | 5.175 | 641103 | G/T | 350213 | −0.05 | 0.05 | 0.31 | 0.13 | 0.21 |
| 349400 | Un.11944 | 14854 | C/G | 349400 | 0.13 | 0.12 | 0.20 | 0.08 | −0.09 |
| 350994 | 29.3 | 130795 | A/G | 350994 | 0.16 | 0.17 | −0.55 | 0.29 | 0.04 |
| 348268 | 5.17 | 52727 | A/C | 348268 | −0.92 | 0.62 | NaN | NaN | 0.00 |
| 352775 | Un.5392 | 43292 | C/T | 352775 | 0.04 | 0.09 | −0.15 | 0.08 | 0.13 |
| 344576 | 3.162 | 380554 | G/T | 344576 | −0.36 | 0.18 | −0.07 | 0.06 | 0.14 |
| 345852 | Un.888 | 42298 | A/G | 345852 | −0.01 | 0.05 | 0.18 | 0.09 | −0.29 |
| 348677 | 25.18 | 276801 | A/G | 348677 | 0.06 | 0.05 | −0.31 | 0.16 | 0.09 |
| 343726 | Un.64 | 830575 | A/G | 343726 | 0.72 | 0.37 | −0.05 | 0.11 | −0.01 |
| 348058 | 2.196 | 32036 | C/T | 348058 | 0.03 | 0.06 | 0.06 | 0.07 | −0.36 |
| 350890 | 27.58 | 550606 | C/T | 350890 | −0.10 | 0.05 | 0.17 | 0.09 | 0.14 |
| 352304 | Un.4101 | 41415 | A/T | 352304 | 0.10 | 0.07 | 0.07 | 0.08 | −0.20 |
| 351190 | 26.65 | 637074 | G/T | 351190 | 0.26 | 0.11 | −0.00 | 0.06 | −0.12 |
| 353955 | 22.21 | 72276 | A/G | 353955 | 0.06 | 0.05 | −0.28 | 0.11 | 0.36 |
| 344114 | 1.253 | 32791 | C/T | 344114 | −0.43 | 0.11 | −0.05 | 0.08 | 0.09 |
| 346646 | 22.46 | 1024610 | G/T | 346646 | −0.08 | 0.07 | 0.02 | 0.07 | 0.29 |
| 344573 | Un.80 | 791689 | C/G | 344573 | −0.05 | 0.05 | 0.24 | 0.10 | −0.09 |
| 344761 | 19.36 | 9351 | G/T | 344761 | 0.00 | 0.07 | 0.01 | 0.06 | −0.40 |
| 346257 | 16.119 | 23767 | C/T | 346257 | 0.03 | 0.05 | 0.12 | 0.16 | −0.53 |
| 350520 | 16.7 | 90701 | A/G | 350520 | −0.16 | 0.06 | 0.15 | 0.08 | 0.10 |
| 347204 | 26.68 | 145643 | A/G | 347204 | −0.22 | NaN | −0.34 | 0.15 | 0.04 |
| 348940 | 23.13 | 720641 | A/G | 348940 | 0.04 | 0.05 | −0.48 | 0.22 | −0.06 |
| 350154 | 11.154 | 294233 | A/G | 350154 | 0.27 | 0.11 | −0.10 | 0.07 | −0.01 |
| 342951 | Un.1681 | 173112 | A/G | 342951 | −0.02 | 0.05 | 0.44 | 0.19 | −0.03 |
| 344064 | 3.181 | 604919 | C/T | 344064 | 0.06 | 0.09 | −0.09 | 0.06 | 0.24 |
| 344260 | Un.7963 | 20271 | A/C | 344260 | −0.04 | 0.05 | −0.20 | 0.16 | 0.27 |
| 347268 | 11.173 | 33171 | C/G | 347268 | −0.22 | 0.13 | −0.02 | 0.06 | 0.14 |
| 350945 | Un.1947 | 57836 | A/G | 350945 | 0.00 | 0.06 | −0.06 | 0.07 | 0.53 |
| 353698 | 2.41 | 199334 | C/T | 353698 | −0.30 | 0.11 | 0.17 | 0.10 | 0.01 |
| 353972 | 1.194 | 283477 | C/T | 353972 | −0.05 | 0.05 | 0.17 | 0.24 | 0.19 |
| 350771 | 15.127 | 476703 | C/T | 350771 | −0.07 | 0.06 | 0.18 | 0.07 | −0.10 |
| 351373 | Un.120 | 332372 | A/G | 351373 | 0.08 | 0.07 | 0.01 | 0.07 | −0.32 |
| 348026 | Un.8890 | 18036 | A/G | 348026 | 0.09 | 0.06 | −0.19 | 0.10 | 0.21 |
| 353550 | Un.1173 | 227678 | A/G | 353550 | 0.06 | 0.05 | −0.12 | 0.13 | −0.78 |
| 348198 | 24.15 | 448252 | A/C | 348198 | −0.02 | 0.07 | 0.20 | 0.11 | −0.15 |
| 349814 | Un.120 | 332325 | C/T | 349814 | 0.08 | 0.07 | 0.01 | 0.07 | −0.32 |
| 346089 | 9.87 | 729686 | G/T | 346089 | 0.38 | 0.19 | −0.02 | 0.11 | −0.02 |
| 343284 | 11.192 | 299737 | C/T | 343284 | −0.13 | 0.07 | 0.14 | 0.07 | −0.03 |
| 344145 | 4.56 | 182359 | C/T | 344145 | 0.32 | 0.18 | 0.07 | 0.09 | −0.07 |
| 352054 | 24.42 | 281787 | A/G | 352054 | 0.85 | 0.39 | −0.07 | 0.21 | −0.00 |
| 349170 | 5.49 | 6863 | A/T | 349170 | 0.25 | 0.09 | −0.02 | 0.07 | −0.08 |
| 349944 | Un.11 | 1300793 | A/G | 349944 | 0.12 | 0.06 | −0.33 | 0.18 | 0.05 |
| 351679 | 2.196 | 20030 | A/C | 351679 | −0.27 | 0.13 | 0.03 | 0.06 | 0.09 |
| 343328 | 25.31 | 316043 | A/G | 343328 | −0.05 | 0.06 | 0.20 | 0.09 | −0.08 |
| 343990 | Un.760 | 280889 | C/T | 343990 | 0.03 | 0.09 | 0.14 | 0.08 | −0.14 |
| 354309 | Un.12 | 725041 | C/T | 354309 | 0.25 | 0.09 | −0.03 | 0.06 | −0.10 |
| 344338 | 10.21 | 154297 | C/T | 344338 | 0.00 | 0.05 | −0.03 | 0.08 | 0.86 |
| 349116 | Un.12818 | 12550 | C/T | 349116 | −0.02 | 0.07 | −0.09 | 0.07 | 0.27 |
| 345082 | 15.4 | 379496 | A/G | 345082 | −0.02 | 0.04 | 0.27 | 0.13 | −0.15 |
| 345971 | 30.75 | 281410 | C/T | 345971 | −0.01 | 0.04 | 0.77 | 0.41 | NaN |
| 350209 | 20.71 | 229003 | G/T | 350209 | −0.07 | 0.06 | 0.20 | 0.09 | −0.05 |
| 344111 | NULL | NULL | A/C | 344111 | −0.02 | 0.07 | 0.15 | 0.07 | −0.16 |
| 346429 | Un.12818 | 12728 | C/T | 346429 | −0.02 | 0.07 | −0.08 | 0.07 | 0.27 |
| 351102 | 5.98 | 61033 | A/G | 351102 | 0.17 | 0.08 | −0.01 | 0.09 | −0.12 |
| 345331 | 25.54 | 9023 | A/G | 345331 | −0.14 | 0.07 | 0.11 | 0.06 | 0.10 |
| 347729 | 16.53 | 53443 | A/G | 347729 | −0.11 | 0.12 | 0.17 | 0.07 | −0.08 |
| 351561 | 6.78 | 359331 | A/T | 351561 | −0.30 | 0.10 | 0.06 | 0.08 | 0.06 |
| 351747 | Un.78 | 386183 | A/G | 351747 | −0.19 | 0.10 | 0.14 | 0.07 | −0.01 |
| 353461 | Un.1786 | 134734 | G/T | 353461 | 0.04 | 0.05 | −0.32 | 0.11 | 0.46 |
| 353888 | Un.688 | 9871 | C/G | 353888 | 0.03 | 0.07 | 0.09 | 0.07 | −0.28 |
| 345708 | 20.5 | 109635 | A/G | 345708 | 0.56 | 0.33 | 0.07 | 0.09 | −0.05 |
| 353431 | Un.113 | 46312 | C/T | 353431 | −0.52 | 0.16 | 0.09 | 0.13 | 0.02 |
| 347137 | 16.7 | 503497 | G/T | 347137 | −0.15 | 0.11 | 0.00 | 0.07 | 0.18 |
| 351781 | 16.53 | 53223 | A/G | 351781 | −0.11 | 0.12 | 0.17 | 0.07 | −0.08 |
| 345063 | 20.17 | 280653 | G/T | 345063 | −0.06 | 0.06 | 0.20 | 0.08 | −0.27 |
| 351730 | Un.5686 | 11094 | C/T | 351730 | −0.26 | 0.08 | 0.04 | 0.09 | 0.06 |
| 354456 | 8.1 | 36180 | C/T | 354456 | 0.09 | 0.06 | −0.00 | 0.09 | −0.29 |
| 343396 | 3.161 | 8871 | C/T | 343396 | 0.00 | 0.06 | −0.12 | 0.07 | 0.24 |
| 347117 | NULL | NULL | A/G | 347117 | 0.18 | 0.07 | −0.10 | 0.07 | −0.06 |
| 348666 | 14.99 | 87546 | A/G | 348666 | 0.00 | 0.08 | 0.09 | 0.06 | −0.23 |
| 352499 | 13.25 | 535313 | A/G | 352499 | 0.17 | 0.07 | −0.09 | 0.07 | 0.00 |
| 344347 | 26.65 | 636814 | C/T | 344347 | 0.82 | 0.41 | −0.09 | 0.07 | 0.03 |
| 349557 | NULL | NULL | C/G | 349557 | 0.04 | 0.06 | −0.12 | 0.07 | 0.35 |
| 351300 | NULL | NULL | C/T | 351300 | −0.09 | 0.06 | 0.17 | 0.07 | 0.12 |
| 352151 | 9.61 | 14338 | A/T | 352151 | 0.06 | 0.05 | −0.10 | 0.11 | −0.56 |
| 345384 | 8.1 | 327168 | G/T | 345384 | 0.18 | 0.08 | −0.12 | 0.08 | −0.04 |
| 347400 | 3.138 | 666684 | C/G | 347400 | −0.02 | 0.07 | 0.15 | 0.07 | −0.15 |
| 347055 | Un.10793 | 15469 | A/G | 347055 | −0.12 | 0.12 | −0.10 | 0.06 | 0.16 |
| 353259 | 20.71 | 83444 | C/T | 353259 | −0.48 | 0.14 | 0.17 | 0.13 | −0.01 |
| 349787 | 28.51 | 78070 | C/T | 349787 | −0.04 | 0.06 | 0.16 | 0.07 | −0.20 |

| snp_id | SE | N | Freq | a | k | a | tmax | PermP | SEQ ID NO: |
|---|---|---|---|---|---|---|---|---|---|
| 344295 | 0.10 | 168 | 0.62 | 0.07 | −3.84 | 0.00 | 3.67 | 0.0003 | 1462 |
| 347447 | 0.05 | 168 | 0.13 | 0.48 | −0.90 | 0.80 | 4.03 | 0.0003 | 1463 |
| 352858 | 0.04 | 166 | 0.04 | −0.16 | −7.42 | −1.29 | 4.33 | 0.0004 | 1464 |
| 347467 | 0.05 | 168 | 0.16 | −0.07 | −5.68 | −0.35 | 3.39 | 0.0005 | 1465 |
| 349904 | 0.06 | 164 | 0.44 | −0.05 | 22.03 | 0.09 | 3.32 | 0.0005 | 1466 |
| 344183 | 0.05 | 168 | 0.10 | −0.16 | 1.59 | 0.05 | 3.43 | 0.0006 | 1467 |
| 345548 | 0.05 | 167 | 0.22 | −0.29 | −1.21 | −0.49 | 3.44 | 0.0006 | 1468 |
| 351609 | 0.05 | 164 | 0.09 | 0.54 | −0.84 | 0.90 | 3.40 | 0.0006 | 1469 |
| 350871 | 0.05 | 168 | 0.20 | 0.13 | 1.52 | 0.01 | 3.22 | 0.0008 | 1470 |
| 350305 | 0.07 | 168 | 0.37 | 0.12 | 1.77 | 0.07 | 3.57 | 0.0009 | 1471 |
| 343608 | 0.07 | 155 | 0.30 | −0.05 | −7.42 | −0.18 | 2.95 | 0.0011 | 1472 |
| 350930 | 0.05 | 168 | 0.09 | 0.54 | −0.82 | 0.91 | 3.43 | 0.0012 | 1473 |
| 347497 | 0.05 | 168 | 0.09 | 0.54 | −0.82 | 0.91 | 3.43 | 0.0013 | 1474 |
| 342489 | 0.15 | 165 | 0.80 | 0.25 | 1.81 | 0.52 | 3.25 | 0.0014 | 1475 |
| 347190 | 0.09 | 168 | 0.49 | 0.09 | 2.53 | 0.09 | 3.05 | 0.0014 | 1476 |
| 349724 | 0.05 | 168 | 0.14 | −0.37 | −0.98 | −0.63 | 3.44 | 0.0014 | 1477 |
| 348335 | 0.05 | 166 | 0.33 | −0.02 | −20.93 | −0.13 | 3.14 | 0.0015 | 1478 |
| 346457 | 0.33 | 167 | 0.83 | 0.02 | −15.43 | −0.17 | 3.18 | 0.0016 | 1479 |
| 346899 | 0.05 | 168 | 0.18 | −0.04 | −8.80 | −0.24 | 2.82 | 0.0016 | 1480 |
| 354051 | 0.11 | 167 | 0.63 | −0.11 | −2.04 | −0.05 | 3.57 | 0.0016 | 1481 |
| 344214 | 0.11 | 160 | 0.60 | 0.14 | 1.90 | 0.19 | 3.25 | 0.0018 | 1482 |
| 345920 | 0.12 | 167 | 0.57 | −0.11 | 2.37 | −0.14 | 2.96 | 0.0018 | 1483 |
| 350159 | 0.05 | 165 | 0.09 | 0.55 | −0.81 | 0.91 | 3.46 | 0.0018 | 1484 |
| 352489 | 0.03 | 168 | 0.92 | −0.08 | −3.93 | 0.18 | 2.99 | 0.0018 | 1485 |
| 353900 | NaN | 165 | 0.91 | NaN | NaN | NaN | 3.08 | 0.0018 | 1486 |
| 354010 | 0.05 | 168 | 0.19 | −0.27 | −1.37 | −0.51 | 3.29 | 0.0018 | 1487 |
| 348544 | 0.28 | 168 | 0.87 | 0.33 | 1.20 | 0.62 | 3.09 | 0.0019 | 1488 |
| 347844 | 0.15 | 167 | 0.81 | −0.19 | −0.64 | −0.11 | 2.88 | 0.0022 | 1489 |
| 348208 | 0.06 | 159 | 0.25 | −0.11 | −3.38 | −0.28 | 2.99 | 0.0022 | 1490 |
| 344568 | NaN | 168 | 0.96 | 0.05 | −9.45 | −0.38 | 2.90 | 0.0024 | 1491 |
| 346260 | NaN | 168 | 0.96 | 0.05 | −9.45 | −0.38 | 2.90 | 0.0024 | 1492 |
| 346803 | 0.08 | 168 | 0.60 | −0.14 | −1.16 | −0.11 | 2.94 | 0.0025 | 1493 |
| 345870 | 0.07 | 165 | 0.45 | −0.16 | −0.86 | −0.18 | 2.95 | 0.0029 | 1494 |
| 349884 | 0.39 | 168 | 0.91 | −0.43 | 0.97 | −0.77 | 2.77 | 0.0029 | 1495 |
| 351830 | 0.12 | 168 | 0.65 | 0.20 | 0.86 | 0.25 | 3.07 | 0.0029 | 1496 |
| 352396 | 0.06 | 168 | 0.35 | −0.20 | −0.87 | −0.25 | 3.08 | 0.0029 | 1497 |
| 343102 | 0.12 | 162 | 0.62 | −0.17 | 0.17 | −0.18 | 2.94 | 0.0030 | 1498 |
| 346207 | 0.06 | 167 | 0.16 | −0.21 | −1.23 | −0.39 | 2.89 | 0.0030 | 1499 |
| 346237 | 0.10 | 167 | 0.56 | −0.11 | −1.49 | −0.09 | 2.79 | 0.0030 | 1500 |
| 346881 | 0.06 | 168 | 0.35 | −0.20 | −0.87 | −0.25 | 3.08 | 0.0030 | 1501 |
| 349455 | 0.18 | 166 | 0.84 | 0.12 | 3.97 | 0.44 | 3.29 | 0.0030 | 1502 |
| 354162 | 0.06 | 167 | 0.19 | 0.05 | 4.72 | −0.10 | 3.13 | 0.0030 | 1503 |
| 345666 | 0.07 | 168 | 0.47 | 0.14 | −0.75 | 0.15 | 2.82 | 0.0031 | 1504 |
| 347009 | 0.10 | 165 | 0.64 | 0.16 | 1.33 | 0.22 | 2.94 | 0.0031 | 1505 |
| 348378 | 0.07 | 168 | 0.47 | 0.14 | −0.75 | 0.15 | 2.82 | 0.0031 | 1506 |
| 342943 | 0.15 | 165 | 0.73 | 0.20 | 0.55 | 0.26 | 2.74 | 0.0032 | 1507 |
| 347933 | 0.05 | 159 | 0.04 | NaN | NaN | NaN | 2.94 | 0.0032 | 1508 |
| 347783 | 0.06 | 165 | 0.25 | 0.20 | −0.43 | 0.24 | 2.76 | 0.0033 | 1509 |
| 351157 | 0.05 | 166 | 0.14 | 0.48 | −0.77 | 0.74 | 2.84 | 0.0033 | 1510 |
| 348153 | 0.39 | 167 | 0.92 | −0.43 | 0.88 | −0.74 | 2.78 | 0.0034 | 1511 |
| 345455 | 0.07 | 144 | 0.31 | −0.17 | 0.51 | −0.13 | 2.53 | 0.0035 | 1512 |
| 351473 | 0.05 | 161 | 0.24 | 0.18 | 0.70 | 0.11 | 2.98 | 0.0036 | 1513 |
| 349248 | 0.07 | 167 | 0.53 | −0.14 | 0.80 | −0.15 | 2.82 | 0.0037 | 1514 |
| 351790 | 0.13 | 161 | 0.76 | −0.10 | 3.87 | −0.29 | 2.76 | 0.0037 | 1515 |
| 347189 | 0.04 | 168 | 0.10 | 0.44 | −0.78 | 0.71 | 2.86 | 0.0038 | 1516 |
| 343732 | 0.06 | 162 | 0.30 | 0.18 | −0.47 | 0.21 | 2.81 | 0.0040 | 1517 |
| 344074 | 0.07 | 168 | 0.52 | −0.13 | 0.71 | −0.14 | 2.69 | 0.0042 | 1518 |
| 343015 | 0.08 | 155 | 0.43 | −0.12 | −1.83 | −0.15 | 2.82 | 0.0043 | 1519 |
| 349117 | 0.12 | 167 | 0.66 | −0.14 | 1.56 | −0.21 | 2.79 | 0.0043 | 1520 |
| 351241 | 0.05 | 168 | 0.17 | −0.01 | 22.42 | 0.16 | 2.65 | 0.0043 | 1521 |
| 352073 | 0.08 | 161 | 0.36 | −0.06 | 4.09 | 0.01 | 2.84 | 0.0043 | 1522 |
| 346121 | 0.09 | 155 | 0.62 | 0.08 | −2.56 | 0.03 | 2.85 | 0.0044 | 1523 |
| 348916 | 0.10 | 158 | 0.53 | −0.11 | −1.59 | −0.10 | 2.80 | 0.0044 | 1524 |
| 351544 | 0.11 | 168 | 0.84 | 0.18 | 1.94 | 0.42 | 2.90 | 0.0044 | 1525 |
| 352834 | 0.05 | 165 | 0.06 | −0.24 | 0.75 | −0.08 | 3.02 | 0.0045 | 1526 |
| 344400 | 0.17 | 156 | 0.78 | −0.04 | 8.41 | −0.20 | 2.65 | 0.0046 | 1527 |
| 343146 | NaN | 161 | 0.90 | 0.06 | −3.85 | −0.13 | 2.67 | 0.0047 | 1528 |
| 344529 | 0.14 | 142 | 0.67 | −0.03 | −7.09 | 0.05 | 2.60 | 0.0047 | 1529 |
| 349950 | 0.08 | 168 | 0.46 | 0.11 | 1.58 | 0.10 | 2.63 | 0.0047 | 1530 |
| 343712 | 0.05 | 165 | 0.21 | 0.24 | −0.59 | 0.32 | 2.76 | 0.0048 | 1531 |
| 343738 | 0.16 | 168 | 0.80 | 0.04 | 7.70 | 0.23 | 2.82 | 0.0049 | 1532 |
| 343747 | 0.16 | 163 | 0.83 | 0.20 | 1.38 | 0.38 | 2.89 | 0.0049 | 1533 |
| 346307 | 0.07 | 167 | 0.39 | −0.14 | −1.30 | −0.18 | 2.70 | 0.0049 | 1534 |
| 347494 | 0.15 | 163 | 0.77 | −0.06 | 5.33 | −0.25 | 2.73 | 0.0049 | 1535 |
| 350337 | 0.07 | 168 | 0.43 | 0.11 | −2.21 | 0.14 | 2.78 | 0.0049 | 1536 |
| 353281 | 0.06 | 167 | 0.19 | 0.07 | 2.89 | −0.05 | 2.65 | 0.0049 | 1537 |
| 351998 | 0.09 | 167 | 0.59 | 0.11 | 2.06 | 0.14 | 2.74 | 0.0050 | 1538 |
| 342821 | 0.06 | 168 | 0.31 | −0.19 | −1.14 | −0.28 | 2.78 | 0.0051 | 1539 |
| 352336 | 0.11 | 156 | 0.69 | 0.14 | −0.95 | 0.09 | 2.87 | 0.0051 | 1540 |
| 354185 | 0.08 | 168 | 0.53 | 0.14 | 1.18 | 0.15 | 2.72 | 0.0051 | 1541 |
| 347765 | 0.18 | 168 | 0.82 | 0.22 | 1.23 | 0.40 | 2.71 | 0.0052 | 1542 |
| 350772 | 0.20 | 164 | 0.81 | 0.27 | 0.22 | 0.31 | 3.01 | 0.0052 | 1543 |
| 349872 | 0.05 | 167 | 0.21 | 0.21 | −1.02 | 0.34 | 2.86 | 0.0053 | 1544 |
| 352390 | 0.14 | 168 | 0.90 | −0.10 | 4.23 | −0.46 | 2.87 | 0.0053 | 1545 |
| 350508 | 0.06 | 167 | 0.34 | −0.16 | −1.51 | −0.24 | 2.78 | 0.0055 | 1546 |
| 351413 | 0.39 | 166 | 0.92 | −0.43 | 0.89 | −0.75 | 2.78 | 0.0055 | 1547 |
| 346375 | 0.06 | 165 | 0.25 | 0.04 | 5.85 | −0.07 | 2.63 | 0.0057 | 1548 |
| 346361 | 0.15 | 168 | 0.73 | −0.14 | 2.25 | −0.28 | 2.81 | 0.0058 | 1549 |
| 348493 | 0.08 | 168 | 0.51 | 0.04 | −6.18 | 0.04 | 2.78 | 0.0058 | 1550 |
| 350213 | 0.24 | 168 | 0.89 | −0.13 | −1.74 | 0.05 | 2.72 | 0.0058 | 1551 |
| 349400 | 0.06 | 168 | 0.23 | 0.11 | 1.59 | 0.02 | 2.69 | 0.0059 | 1552 |
| 350994 | 0.05 | 148 | 0.14 | 0.06 | −10.17 | 0.54 | 2.84 | 0.0059 | 1553 |
| 348268 | 0.05 | 148 | 0.02 | −0.46 | NaN | NaN | 2.77 | 0.0060 | 1554 |
| 352775 | 0.07 | 154 | 0.46 | −0.05 | 4.88 | −0.03 | 2.69 | 0.0061 | 1555 |
| 344576 | 0.06 | 168 | 0.29 | −0.25 | −0.18 | −0.27 | 2.95 | 0.0062 | 1556 |
| 345852 | 0.16 | 168 | 0.74 | 0.14 | 2.29 | 0.30 | 2.82 | 0.0062 | 1557 |
| 348677 | 0.20 | 167 | 0.90 | −0.02 | 20.10 | −0.33 | 2.69 | 0.0063 | 1558 |
| 343726 | 0.05 | 168 | 0.10 | 0.36 | −1.13 | 0.69 | 2.75 | 0.0065 | 1559 |
| 348058 | 0.15 | 168 | 0.76 | 0.20 | 1.13 | 0.32 | 2.77 | 0.0065 | 1560 |
| 350890 | 0.20 | 167 | 0.77 | −0.12 | −1.25 | −0.04 | 2.76 | 0.0065 | 1561 |
| 352304 | 0.09 | 166 | 0.55 | 0.15 | 0.77 | 0.17 | 2.79 | 0.0065 | 1562 |
| 351190 | 0.08 | 167 | 0.41 | 0.19 | −0.38 | 0.20 | 2.73 | 0.0066 | 1563 |
| 353955 | 0.29 | 157 | 0.87 | −0.15 | 3.23 | −0.51 | 2.85 | 0.0066 | 1564 |
| 344114 | 0.06 | 168 | 0.24 | −0.26 | −0.46 | −0.32 | 2.87 | 0.0068 | 1565 |
| 346646 | 0.11 | 165 | 0.65 | −0.19 | 0.45 | −0.21 | 2.56 | 0.0068 | 1566 |
| 344573 | 0.11 | 165 | 0.85 | 0.02 | 14.69 | 0.24 | 2.63 | 0.0069 | 1567 |
| 344761 | 0.16 | 152 | 0.67 | 0.20 | 1.02 | 0.27 | 2.75 | 0.0069 | 1568 |
| 346257 | 0.25 | 164 | 0.91 | 0.28 | 1.33 | 0.58 | 2.69 | 0.0069 | 1569 |
| 350520 | 0.09 | 164 | 0.55 | −0.13 | −1.41 | −0.11 | 3.07 | 0.0069 | 1570 |
| 347204 | 0.05 | 168 | 0.05 | −0.13 | 1.99 | 0.10 | 2.49 | 0.0070 | 1571 |
| 348940 | NaN | 167 | 0.96 | 0.05 | −9.73 | −0.38 | 2.88 | 0.0070 | 1572 |
| 350154 | 0.06 | 166 | 0.39 | 0.14 | −1.63 | 0.19 | 2.79 | 0.0070 | 1573 |
| 342951 | 0.18 | 159 | 0.86 | 0.01 | 85.17 | 0.34 | 2.73 | 0.0071 | 1574 |
| 344064 | 0.11 | 166 | 0.60 | −0.09 | 2.61 | −0.14 | 2.73 | 0.0071 | 1575 |
| 344260 | 0.13 | 167 | 0.80 | −0.16 | 1.98 | −0.34 | 2.66 | 0.0071 | 1576 |
| 347268 | 0.07 | 167 | 0.38 | −0.18 | −0.09 | −0.19 | 2.68 | 0.0072 | 1577 |
| 350945 | 0.18 | 168 | 0.81 | −0.26 | 1.23 | −0.46 | 2.99 | 0.0072 | 1578 |
| 353698 | 0.05 | 165 | 0.22 | −0.15 | −2.01 | −0.33 | 2.94 | 0.0074 | 1579 |
| 353972 | 0.07 | 146 | 0.60 | −0.12 | −0.81 | −0.10 | 2.71 | 0.0074 | 1580 |
| 350771 | 0.21 | 167 | 0.79 | 0.02 | 15.22 | 0.17 | 2.61 | 0.0076 | 1581 |
| 351373 | 0.12 | 168 | 0.67 | 0.20 | 0.65 | 0.25 | 2.82 | 0.0076 | 1582 |
| 348026 | 0.16 | 132 | 0.80 | −0.06 | 5.91 | −0.26 | 2.53 | 0.0077 | 1583 |
| 353550 | 0.20 | 167 | 0.90 | 0.42 | 0.57 | 0.61 | 2.63 | 0.0077 | 1584 |
| 348198 | 0.07 | 149 | 0.52 | 0.07 | 4.36 | 0.08 | 2.84 | 0.0078 | 1585 |
| 349814 | 0.12 | 168 | 0.67 | 0.20 | 0.65 | 0.25 | 2.82 | 0.0078 | 1586 |
| 346089 | 0.05 | 168 | 0.20 | 0.20 | −1.00 | 0.33 | 2.64 | 0.0079 | 1587 |
| 343284 | 0.10 | 167 | 0.57 | −0.05 | −4.26 | −0.02 | 2.71 | 0.0080 | 1588 |
| 344145 | 0.05 | 168 | 0.23 | 0.19 | −0.30 | 0.23 | 2.63 | 0.0080 | 1589 |
| 352054 | 0.04 | 168 | 0.07 | 0.42 | −1.16 | 0.85 | 2.66 | 0.0080 | 1590 |
| 349170 | 0.07 | 167 | 0.40 | 0.16 | −0.68 | 0.18 | 2.71 | 0.0081 | 1591 |
| 349944 | 0.10 | 136 | 0.70 | 0.04 | −11.24 | −0.13 | 2.74 | 0.0081 | 1592 |
| 351679 | 0.07 | 166 | 0.36 | −0.18 | −0.67 | −0.21 | 2.70 | 0.0081 | 1593 |
| 343328 | 0.14 | 160 | 0.71 | 0.02 | 16.38 | 0.12 | 2.49 | 0.0083 | 1594 |
| 343990 | 0.07 | 166 | 0.46 | 0.08 | 2.46 | 0.07 | 2.76 | 0.0083 | 1595 |
| 354309 | 0.08 | 167 | 0.44 | 0.18 | −0.60 | 0.19 | 2.82 | 0.0083 | 1596 |
| 344338 | 0.55 | 167 | 0.87 | −0.43 | 1.08 | −0.77 | 2.78 | 0.0084 | 1597 |
| 349116 | 0.12 | 165 | 0.65 | −0.14 | 1.54 | −0.21 | 2.83 | 0.0085 | 1598 |
| 345082 | 0.20 | 168 | 0.81 | 0.07 | 5.41 | 0.29 | 2.59 | 0.0086 | 1599 |
| 345971 | NaN | 167 | 0.99 | NaN | NaN | NaN | 2.70 | 0.0086 | 1600 |
| 350209 | 0.14 | 167 | 0.76 | −0.01 | −43.28 | 0.13 | 2.64 | 0.0086 | 1601 |
| 344111 | 0.09 | 165 | 0.50 | 0.07 | 3.51 | 0.07 | 2.69 | 0.0088 | 1602 |
| 346429 | 0.12 | 168 | 0.65 | −0.14 | 1.46 | −0.20 | 2.67 | 0.0088 | 1603 |
| 351102 | 0.08 | 162 | 0.51 | 0.14 | −0.22 | 0.14 | 2.64 | 0.0088 | 1604 |
| 345331 | 0.15 | 165 | 0.66 | −0.12 | −1.05 | −0.08 | 2.61 | 0.0089 | 1605 |
| 347729 | 0.06 | 168 | 0.37 | −0.02 | −16.57 | −0.08 | 2.60 | 0.0090 | 1606 |
| 351561 | 0.06 | 151 | 0.26 | −0.18 | −0.99 | −0.27 | 2.57 | 0.0091 | 1607 |
| 351747 | 0.07 | 168 | 0.41 | −0.09 | −2.70 | −0.13 | 2.73 | 0.0091 | 1608 |
| 353461 | 0.23 | 160 | 0.93 | −0.21 | 2.71 | −0.70 | 2.72 | 0.0091 | 1609 |
| 353888 | 0.13 | 168 | 0.65 | 0.15 | 1.37 | 0.22 | 2.71 | 0.0091 | 1610 |
| 345708 | 0.05 | 167 | 0.18 | 0.31 | −0.58 | 0.42 | 2.75 | 0.0092 | 1611 |
| 353431 | 0.05 | 167 | 0.13 | −0.27 | −1.25 | −0.53 | 2.70 | 0.0092 | 1612 |
| 347137 | 0.07 | 160 | 0.48 | −0.16 | 0.06 | −0.16 | 2.48 | 0.0093 | 1613 |
| 351781 | 0.06 | 168 | 0.37 | −0.02 | −16.57 | −0.08 | 2.60 | 0.0093 | 1614 |
| 345063 | 0.21 | 168 | 0.83 | 0.10 | 3.51 | 0.35 | 2.61 | 0.0094 | 1615 |
| 351730 | 0.07 | 161 | 0.34 | −0.16 | −0.90 | −0.21 | 2.68 | 0.0094 | 1616 |
| 354456 | 0.16 | 158 | 0.72 | 0.19 | 0.50 | 0.23 | 2.63 | 0.0094 | 1617 |
| 343396 | 0.14 | 167 | 0.67 | −0.12 | 1.97 | −0.20 | 2.62 | 0.0095 | 1618 |
| 347117 | 0.09 | 167 | 0.56 | 0.12 | −1.27 | 0.10 | 2.62 | 0.0095 | 1619 |
| 348666 | 0.10 | 168 | 0.62 | 0.12 | 1.74 | 0.17 | 2.68 | 0.0095 | 1620 |
| 352499 | 0.09 | 166 | 0.55 | 0.08 | −2.15 | 0.07 | 2.49 | 0.0095 | 1621 |
| 344347 | 0.06 | 167 | 0.17 | 0.39 | −1.32 | 0.74 | 2.85 | 0.0096 | 1622 |
| 349557 | 0.16 | 167 | 0.79 | −0.16 | 1.96 | −0.34 | 2.78 | 0.0096 | 1623 |
| 351300 | 0.13 | 167 | 0.74 | −0.10 | −1.52 | −0.03 | 2.59 | 0.0096 | 1624 |
| 352151 | 0.37 | 168 | 0.87 | 0.31 | 0.49 | 0.42 | 2.68 | 0.0096 | 1625 |
| 345384 | 0.07 | 157 | 0.46 | 0.11 | −1.73 | 0.13 | 2.68 | 0.0097 | 1626 |
| 347400 | 0.10 | 167 | 0.55 | 0.06 | 3.70 | 0.09 | 2.50 | 0.0097 | 1627 |
| 347055 | 0.07 | 166 | 0.36 | −0.14 | 0.82 | −0.11 | 2.70 | 0.0098 | 1628 |
| 353259 | 0.05 | 157 | 0.03 | −0.24 | −1.77 | −0.63 | 3.43 | 0.0098 | 1629 |
| 349787 | 0.12 | 168 | 0.74 | 0.08 | 3.50 | 0.22 | 2.68 | 0.0100 | 1630 |

Locus is the ParAllele identifiers of the polymorphisms,
N is the number of genotypes,
mean_0 is the mean meat tenderness for genotype 0,
mean_1 is the mean for genotype 1, and
mean_2 is the mean of genotype 2,
SE is the standard error,
a is the additive effect,
k is the dominance effect,
alpha is the average effect of allele substitutions,
tmax is the value of the t test, and
PermP is the P value determined from 100,000 permutation tests expressed as a positive integer.
A minus value for a means the mean of genotype 0 is lower than the mean of genotype 2, and a minus value for alpha means that selecting for allele 0 will reduce the average values of meat tenderness in the population.
Scaffold-v2 is the Draft version 2 Bovine genome sequence,
bp is the location in base pairs in the scaffold, and bases are the alternative bases.

[0102] A further SNP (SEQ ID NO:1631) with indent 343614 located at SCAFFOLD 344371_{—}609 has been found to be associated with LDPF.

### EXAMPLE 10

### Evaluation of a Cluster of SNP Around ParAllele SNP 343617 for Net Feed Intake (NFI)

[0103] It has been established that the SNP 343617 (SEQ ID NO:1632) lies in the gene encoding Synaptotagmin X (SYT 10). Synaptotagmins are integral membrane proteins of synaptic vesicle thought to serve as Ca(2+) sensors. They are involved in vesicular trafficking, and in the release of neurotransmitter at the synapse. While not wishing to be bound by theory, it is believed that metabolic rate is influenced by intracellular processes such as proton transport in the mitochondrion, while Sodium and Potassium pumps through the cell membrane are the major influences on basal metabolic rate. The trafficking associated with neurotransmitter release is thought to be part of the background energetics since there is a constant release of neurotransmitter and reconstitution of the neurotransmitter gradient, all requiring energy. Note that in SEQ ID NO: 1632 and the polymorphism is at position 3401 of scaffold 35407 and is a T/C polymorphism—the TT homozygote worse for NFI.

TABLE 35
Associations between DNA markers and Net Feed Intake sort in
decreasing order of statistical significance.

| run | locus | inf | N | mean_0 | SE | N | mean_1 | SE | N | mean_2 | SE | maxd | t | P | log(1/P) |
|---|---|---|---|---|---|---|---|---|---|---|---|---|---|---|---|
| 5278 | 343617 | Y | 84 | −0.09 | 1.75 | 48 | −0.22 | 1.78 | 18 | 1.95 | 1.40 | 2.174 | 8.193 | 0.000E+00 | 5.000 |

Locus and ident are the ParAllele identifiers of the polymorphisms,
inf is whether there are enough genotypes for each genotype for a proper test,
N is the number of genotypes,
mean_0 is the mean NFI for genotype 0,
mean_1 is the mean for genotype 1, and
mean_2 is the mean of genotype 2,
SD is the standard deviation,
maxd is the maximum difference between any of the three genotypes,
t is the value of the t test,
P is the P value determined from 100,000 permutation tests and
log(1/P) is the P value expressed as a positive integer.

TABLE 36
A further SNP with a high probability of being associated with NFI. The
ident is as in Table 35 and is the ParAllele identifiers. These are located on
the BGSP scaffolds and contigs which indicate the SNP location.

| | | BCM contig | |
|---|---|---|---|
| Locus | scaffold | Chrom. | Gene |
| 343617 | scaffold35407_3401 | contig282438 | Hsa12/Bta5SYT10 |
| | | | Synaptotagmin X incl |
| | | | exon4 |

[0104] This example describes the analysis of 3 additional SNP in the SYT10 gene genotyped on all the cattle of Example 1 with NFI measurements. These SNP flank the ParAllele SNP 343617 and form part of 16 potential SNP available in this part of the SYT10 gene. It was found that one of the SNP, SYTX3486, has an overall P<0.001 for the full sample, and it and SNP SYTX6146 have a more consistent association between NFI and genotype.

[0105] We chose other SNP near 343617 for further analysis, to determine if other SNP in the gene show more consistent associations to NFI. We obtained the SNP by examining raw sequence traces from the bovine genome sequence project in the vicinity of SYT10. We genotyped three SNP using standard methods for Taqman assays (ABI, Foster City, Calif.) and analysed the genotypes as in CRA report 3. The linkage disequilibrium estimates for the 4 loci (including 343617) are in Table 37. SYTX3486 (SEQ ID NO:1633) and SYTX6146 (SEQ ID NO:1634) show high values of Linkage Disequilibrium for both measurements, D′ and r², but all the other comparisons, show a large discrepancy between D′ and r². This is due to the presence of zeros in the table, or some cells with very small integers, and D′ becomes 1.0 as soon as there is a zero in the haplotype frequency table, whereas r² does not.

[0106] The SNP SYTX3486 and SYTX6146 show overall associations to NFI that are statistically significant, with SYTX3486 having P=0.00091. The favourable alleles for both SNP are at low frequency, f(0)=0.07 overall for both of them, with three breeds showing the favourable allele with a frequency of 0.01, although the Hereford breed has a frequency of approximately 0.35 for both of these SNP. The similarity in degree of significance for these SNP is consistent with the high LD values for both measures of LD. These SNP are one on either side of 343617, suggesting that the causative SNP has a low frequency of the favourable allele in this gene. A further SNP (SYTX10948—SEQ ID NO:1635) also shows association.

TABLE 37
Linkage disequilibrium measures between the 4 SYT10
SNP obtained by direct counting.

| Locus | Locus | h00 | h01 | h10 | h11 | f(a0) | f(b0) | D′ | r² |
|---|---|---|---|---|---|---|---|---|---|
| sytx3486 | sytx6146 | 44 | 1 | 1 | 2262 | 0.02 | 0.02 | 0.9773 | 0.9552 |
| sytx3486 | sytx10498 | 89 | 0 | 390 | 1909 | 0.04 | 0.20 | 1.0000 | 0.1543 |
| sytx3486 | sytx343617 | 0 | 139 | 549 | 1578 | 0.06 | 0.24 | 1.0000 | 0.0209 |
| sytx6146 | sytx10498 | 89 | 2 | 396 | 1907 | 0.04 | 0.20 | 0.9724 | 0.1471 |
| sytx6146 | sytx343617 | 1 | 142 | 547 | 1578 | 0.06 | 0.24 | 0.9711 | 0.0202 |
| sytx10498 | sytx343617 | 0 | 418 | 474 | 1230 | 0.20 | 0.22 | 1.0000 | 0.0706 |

The haplotypes are h00 to h11, the joint frequencies of the allele frequencies, the Lewontin D′ and the r² (Devlin and Risch, 1995) of each comparison is given.

### EXAMPLE 11

[0107] DNA samples for testing can be obtained from any tissue of the animal although for ease of use, tissues such as hair follicles, buccal swabs, ear punches or skin scrapings are the easiest. Blood samples are also easy to obtain, and for bulls that might be in progeny testing programs, semen samples are also an easy and convenient source of DNA. More generally, any non-cancerous tissue should give the same genotype, and this genotype can even be obtained form a fertilized egg or embryo in its earliest stages. Methods for extracting DNA from liquid or solid tissues have been reported in the literature and kits are available off the shelf to do so, and many methods have been customised to particular applications. Indeed, it is possible to obtain genotypes directly from a tissue without extensive purification, such as directly from micro-drops of blood, as would be known to a practitioner of the art.

[0108] Where DNA was extracted, it might be useful to know what the concentration of the DNA was and its purity, since some methods of genotyping are sensitive to the purity and the concentration of the DNA, not that the genotypes would be incorrect, but that the results might be so faint that the genotypes could not be scored. Nevertheless there are methods known in the art that are sufficiently robust that it would not be necessary to quantify the DNA before genotyping began.

[0109] Clearly, one might put in controls to ensure that the genotypes were accurate, although it would be possible to perform the genotyping without controls. Some controls would be negative in that they contained no DNA, and this would be useful to discriminate noise in the reactions from true genotypes. Some positive controls would also be useful, for animals of known genotype and of good quality DNA. In some cases DNA will not be of a high quality, and having some genotypes that are reliable will help in scoring genotypes since true exemplars can be referred to. In some cases, where a large number of samples were being genotyped, and the samples were located in 96-well or other format plates, it would be useful to have blank samples in known positions, in a different position in every plate, so that each plate would give a unique pattern of blanks. Then, if for some unforeseen reason an error occurred in labelling, this error could be detected because the blanks would not be where they should be.

[0110] Having set up the samples, genotyping could begin. Once an appropriate method of genotyping had been chosen, the results would be obtained. Most current high throughput methods involve electronic capture of genotyping signals and recording of the information on digital media, although some current methods still involve the recording of genotypes on analogue media, for example, by film photography or by recording the genotypes in note books.

[0111] One embodiment of the genotyping would be via the Taqman™ reaction although clearly this is not the only way genotypes could be collected. The DNA sequences listed in this specification would be subjected to analysis, where probes would be designed following the guidelines set out by Applied Biosystems (Foster City, Calif.) (LIVAK 2003). Not all DNA sequences are suitable for the Taqman™ reaction, and this can be determined by inspection or after subjecting the sequence to computerised analysis using software or the free service provided by the manufacturer. Nevertheless, 98% of sequences will be suitable, and a pair of probes, one each for the alternate alleles of the polymorphism, can be synthesized. DNA primers for the polymerase chain reaction will also be needed to amplify the DNA sequence around the polymorphism. The probes and primers are combined and then a polymerase chain reaction is performed on DNA of the animal, using standard methods following the manufacturers instructions. The genotypes are detected using a real time PCR machine and the raw data are collected after the samples are interrogated using laser fluorescence and digital image capture; the probes bind to DNA, and the polymerase collides with the probe, destroying it and releasing a dye which can then fluoresce; each probe is specific for an allele, each member of the pair has a different fluorescent molecule, and so homozygotes have only one of the two probes binding to the DNA while heterozygotes have both probes binding. So the fluorescent molecules report on which probe has been destroyed and hence the genotype of the individual, by the number and identity of fluorescent molecules that are released.

[0112] The genotypes can be used to predict the performance of the animal. This can be done simply by assigning a preferential ranking scheme for each animal based on the number of copies of the favourable alleles of the gene that it possesses. While this might be suitable for a small number of genes, it would be unwieldy for a large number of genes. Another way of implementing the DNA test results would be to give each animal the mean value for the trait, and then to add or subtract the average value of the genotype from the mean value. While this is not very accurate for one or a small number of polymorphisms, as the number of polymorphisms increases, the accuracy of prediction increases markedly. An advantage of such a method is that it allows the fitting of gene effects where the effects are not evenly spaced over the genotypes, for example, where one genotype might be quite different to the others. The most useful case is where the heterozygote shows overdominant effects, which do not fit easily into a scheme of additive rankings, that is, with one homozygote having low average values, the heterozygotes having intermediate average values, and the other homozygote having average high values, but rather where the heterozygotes easily outstrip both homozygotes in performance.

[0113] Once the animals have been assigned performance attributes for one or many traits depending upon which polymorphisms have been genotyped, these genotype combination and predicted attributes can be recorded, reported back to the owners, published or used to select animals for a variety of purposes. Some of the uses are 1) to breed animals with more or less desirable attributes for a particular trait or set of traits, and 2) to choose animals for particular purposes based upon a series of genotypes, for example, as a test on entry into a feedlot to select animals for particular market end points or customer requirements.

### REFERENCES

[0114] BARENDSE, W., and R. FRIES, 1999 Genetic linkage mapping, the gene maps of cattle, and the lists of loci, pp. 329-364 in The genetics of cattle, edited by R. FRIES and A. RUVINSKY. CABI Publishing, Wallingford.
[0115] CHEN, X. N., B. ZEHNBAUER, A. GNIRKE and P. Y. KWOK, 1997 Fluorescence energy transfer detection as a homogeneous DNA diagnostic method. Proceedings of the National Academy of Sciences of the United States of America 94: 10756-10761.
[0116] HARDENBOL, P., J. BANER, M. JAIN, M. NILSSON, E. A. NAMSARAEV et al., 2003 Multiplexed genotyping with sequence-tagged molecular inversion probes. Nature Biotechnology 21: 673-678.
[0117] HARDENBOL, P., F. L. YU, J. BELMONT, J. MACKENZIE, C. BRUCKNER et al., 2005 Highly multiplexed molecular inversion probe genotyping: Over 10,000 targeted SNPs genotyped in a single tube assay. Genome Research 15: 269-275.
[0118] LIVAK, K. J., 2003 SNP genotyping by the 5′-nuclease reaction, pp. 129-147 in Methods in Molecular Biology, edited by P.-Y. KWOK. Humana Press, Totowa N.J.
[0119] STORM, N., B. DARNHOFER-DEMAR, D. VAN DEN BOOM and C. P. RODI, 2002 MALDI-TOF mass spectrometry-based SNP genotyping. Methods in Molecular Biology 212: 214-262.
[0120] LIVAK, K. J., 2003 SNP genotyping by the 5′-nuclease reaction, pp. 129-147 in Methods in Molecular Biology, edited by P.-Y. KWOK. Humana Press, Totowa N.J.

1. A method for assessing a trait in a bovine animal selected from the group consisting of longissimus dorsi peak force, intramuscular fat, retail beef yield and net feed intake and/or its component traits, comprising the steps of:
(1) providing a nucleic acid from the bovine animal or carcass;
(2) assaying for the occurrence of a single nucleotide polymorphism (SNP) identified in any one of SEQ ID Nos: 1 to 1635, wherein the identification of said nucleotide occurrence as set forth (a) in any one of SEQ ID NOs: 1171 to 1631 is associated with variation in longissimus dorsi peak force, (b) in any of SEQ ID Nos: 214 to 842 is associated with intramuscular fat deposition, (c) in any one of SEQ ID NOs: 843 to 1170 is associated with retail beef yield and (d) in any one of SEQ ID NOs: 1 to 213 or 1632 to 1635 is associated with net feed intake and/or its component traits.

2. A method for selecting a bovine animal within a population of bovine animals, comprising the steps of:
(1) providing a nucleic acid sample from the bovine animal;
(2) assaying for the occurrence of a single nucleotide polymorphism (SNP) identified in any one of SEQ ID Nos: 1 to 1635, wherein the identification of said nucleotide occurrence as set forth (a) in any one of SEQ ID NOs: 1171 to 1631 is associated with variation in longissimus dorsi peak force, (b) in any of SEQ ID Nos: 214 to 842 is associated with intramuscular fat deposition, (c) in any one of SEQ ID NOs: 843 to 1170 is associated with retail beef yield and (d) in any one of SEQ ID NOs: 1 to 213 or 1632 to 1635 is associated with net feed intake and/or its component traits; and
(3) selecting a bovine animal exhibiting enhancement of the desired trait.

3. A method as claimed in either one of claims 1 or 2 wherein the nucleic acid is DNA.

4. A method as claimed in claim 3 wherein a DNA hybridization assay is used to detect the nucleotide occurrence.

5. A method as claimed in claim 3 wherein an amplification assay is used to detect the nucleotide occurrence.

6. A method as claimed in claim 5 wherein the amplification assay is PCR.

7. A method as claimed in claim 3 wherein the DNA comprises the sequence set forth in any one of SEQ ID Nos: 1 to 1635, or a fragment thereof of at least 10 contiguous nucleotides which contains the polymorphism.

8. A method as claimed in 1 or 2 wherein the bovine animal is a cow.

9. A method as claimed in claim 8 wherein the cow is a cross or pure breed selected from the group consisting of Angus, Ankole-Watusi, Ayrshire, Bazadaise, Beefalo, Beefmaster, Belgian Blue, Belmont Red, Blonde d'Aquitaine, Bonsmara, Braford, Brahman, Brahmousin, Brangus, Braunvieh, British White, American Brown Swiss, BueLingo, Charolais, Chianina, Corriente, American Devon, Dexters, Droughtmaster, Galloway, Gelbvieh, Guernsey, Hereford, Highland, Holstein, Jersey, Limousin, Lowline, Maine-Anjou, Marchigiana, Milking Shorthorn, Montebeliarde, Murray Grey, Normande, Parthenaise, Piedmontese, Pinzgauer, Romagnola, Salers, Salorn, Santa Gertrudis, Shetland, Shorthorn, Simmental, South Devon, Tarentaise, Texas Longhorn and Wagyu.

10. A method as claimed in claim 9 wherein the cow is a cross or pure breed selected from the group consisting of Angus, Shorthorn, Hereford, Murray Grey, Brahman, Belmont Red and Santa Gertrudis.

11. A solid substrate or surface comprising a plurality of nucleic acids in separate physical locations, including at least one nucleic acid as set forth in SEQ ID NOs: 1 to 1635, or a fragment thereof of at least 10 contiguous nucleotides which contain the polymorphism, immobilised thereon.

12. A kit for assessing a trait in a bovine animal selected from the group consisting of longissimus dorsi peak force, intramuscular fat, retail beef yield and net feed intake and/or its component traits through detection of the occurrence of a single nucleotide polymorphism (SNP) identified in any one of SEQ ID NOs: 1 to 1635, wherein the identification of said nucleotide occurrence as set forth (a) in any one of SEQ ID NOs: 1171 to 1631 is associated with variation in longissimus dorsi peak force, (b) in any of SEQ ID Nos: 214 to 842 is associated with intramuscular fat deposition, (c) in any one of SEQ ID NOs: 843 to 1170 is associated with retail beef yield and (d) in any one of SEQ ID NOs: 1 to 213 or 1632 to 1635 is associated with net feed intake and/or its component traits, comprising an oligonucleotide probe, primer or primer pair, or combinations thereof, for determining said nucleotide occurrence.

13. An oligonucleotide probe, primer or primer pair for detecting the occurrence of a single nucleotide polymorphism as set forth in any one of SEQ ID NOs: 1 to 1635.

14. A method for assessing a trait in a bovine animal selected from the group consisting of longissimus dorsi peak force, intramuscular fat, retail beef yield and net feed intake and/or its component traits, comprising the steps of:
(1) providing a nucleic acid from the bovine animal or carcass;
(2) assaying for the occurrence of a polymorphism in a gene, including in the coding sequences, the introns, promotors and other regulatory sequences of said gene, or a polymorphism in linkage disequilibrium with a polymorphism in said gene, wherein said gene is selected from the group consisting of CLCA4 to CLCA3, ABCC4, RPL11, TULP3, TRPC4, C6orf32, TPT1, GTF3C2, SLC6A15, CTNNA3, DDX46, HS2ST1, NDUFS3, PMS2, TMEM47, CEP1, CAP2, IMPG2, BAZ2B, SENP7, IMPG2, EFCBP2, DCP2, XBPP1, LAMA3, Synaptotagmin X (SYT 10), DMD, EMR2, ZNF33A, DNM1L, GBAS, SEC5L1, ATP1A1, YES1, BSN, POU4F1, SLIT3, ROBO1, KRT1-23, DDX10, GRM1 and BAAT, wherein the identification of said nucleotide occurrence (a) in any one of CLCA4 to CLCA3, ABCC4, RPL11, TULP3, TRPC4 and C6orf32 is associated with variation in longissimus dorsi peak force, (b) in any of TPT1, GTF3C2, SLC6A15, CTNNA3, DDX46, HS2ST1, NDUFS3, PMS2 and TMEM47 is associated with intramuscular fat deposition, (c) in any one of CEP1, CAP2, IMPG2, BAZ2B, SENP7, IMPG2, EFCBP2, DCP2, XBPP1 and LAMA3 is associated with retail beef yield and (d) in any one of Synaptotagmin X (SYT 10), DMD, EMR2, ZNF33A, DNM1L, GBAS, SEC5L1, ATP1A1, YES1, BSN, POU4F1, ROBO1, KRT1-23, DDX10 and BAAT is associated with net feed intake and/or its component traits.

15. A method for selecting a bovine animal within a population of bovine animals, comprising the steps of:
(1) providing a nucleic acid sample from the bovine animal;
(2) assaying for the occurrence of a polymorphism in a gene, including in the coding sequences, the introns, promotors and other regulatory sequences of said gene, or a polymorphism in linkage disequilibrium with a polymorphism in said gene, wherein said gene is selected from the group consisting of CLCA4 to CLCA3, ABCC4, RPL11, TULP3, TRPC4, C6orf32, TPT1, GTF3C2, SLC6A15, CTNNA3, DDX46, HS2ST1, NDUFS3, PMS2, TMEM47, CEP1, CAP2, IMPG2, BAZ2B, SENP7, IMPG2, EFCBP2, DCP2, XBPP1, LAMA3, Synaptotagmin X (SYT 10), DMD, EMR2, ZNF33A, DNM1L, GBAS, SEC5L1, ATP1A1, YES1, BSN, POU4F1, SLIT3, ROBO1, KRT1-23, DDX10, GRM1 and BAAT, and wherein the identification of said nucleotide occurrence (a) in any one of CLCA4 to CLCA3, ABCC4, RPL11, TULP3, TRPC4 and C6orf32 is associated with variation in longissimus dorsi peak force, (b) in any of TPT1, GTF3C2, SLC6A15, CTNNA3, DDX46, HS2ST1, NDUFS3, PMS2 and TMEM47 is associated with intramuscular fat deposition, (c) in any one of CEP1, CAP2, IMPG2, BAZ2B, SENP7, IMPG2, EFCBP2, DCP2, XBPP1 and LAMA3 is associated with retail beef yield and (d) in any one of Synaptotagmin X (SYT 10), DMD, EMR2, ZNF33A, DNM1L, GBAS, SEC5L1, ATP1A1, YES1, BSN, POU4F1, ROBO1, KRT1-23, DDX10 and BAAT is associated with net feed intake and/or its component traits; and
(3) selecting a bovine animal exhibiting enhancement of the desired trait.

16. A kit for assessing a trait in a bovine animal selected from the group consisting of longissimus dorsi peak force, intramuscular fat, retail beef yield and net feed intake and/or its component traits through detection of the occurrence of a single nucleotide polymorphism (SNP) in a gene, including in the coding sequences, the introns, promotors and other regulatory sequences of said gene, or a polymorphism in linkage disequilibrium with a polymorphism in said gene, wherein said gene is selected from the group consisting of CLCA4 to CLCA3, ABCC4, RPL11, TULP3, TRPC4, C6 orf2, TPT1, GTF3C2, SLC6A15, CTNNA3, DDX46, HS2ST1, NDUFS3, PMS2, TMEM47, CEP1, CAP2, IMPG2, BAZ2B, SENP7, IMPG2, EFCBP2, DCP2, XBPP1, LAMA3, Synaptotagmin X (SYT 10), DMD, EMR2, ZNF33A, DNM1L, GBAS, SEC5L1, ATP1A1, YES1, BSN, POU4F1, SLIT3, ROBO1, KRT1-23, DDX10, GRM1 and BAAT, and wherein the identification of said nucleotide occurrence (a) in any one of CLCA4 to CLCA3, ABCC4, RPL11, TULP3, TRPC4 and C6orf32 is associated with variation in longissimus dorsi peak force, (b) in any of TPT1, GTF3C2, SLC6A15, CTNNA3, DDX46, HS2ST1, NDUFS3, PMS2 and TMEM47 is associated with intramuscular fat deposition, (c) in any one of CEP1, CAP2, IMPG2, BAZ2B, SENP7, IMPG2, EFCBP2, DCP2, XBPP1 and LAMA3 is associated with retail beef yield and (d) in any one of Synaptotagmin X (SYT 10), DMD, EMR2, ZNF33A, DNM1L, GBAS, SEC5L1, ATP1A1, YES1, BSN, POU4F1, ROBO1, KRT1-23, DDX10 and BAAT is associated with net feed intake and/or its component traits, comprising an oligonucleotide probe, primer or primer pair, or combinations thereof, for determining said nucleotide occurrence.

The application's sequence listing, which the Patent Office published only in electronic form, follows.

SEQUENCE LISTING (1635 sequences)

SEQ ID NO: 1 - DNA, 501 bp, Bos sp.
  polymorphism (251)..(251)
atccaaacatgagcaaacagaaagacaaaggctttggagatcaaccttaagaactgaagatggagagcctggaatactggtggaactgtgtaactatcctccaggtattggaaggtttgctatctgatgcaattcaggaaatcttcactaaggaatgtccatgtggatgatcccaggagtaacactgactgtcaaaacagtccctgtccttggggatcttgcacctcggtacaggctgggaggttagaaaycactagtaaggacacaggcaagtgtgaggaagtccctgaggccctggggactcacgggagtgtggggaggtcatatttcactagagcgctttgtggaggggggatgaagtggggagcaagactctctgagtataaggtaagaaacaggacattctcaggaataggacaaagagagcttggtgtggaaaataaaatgtatgagggtggagggaagagtctggttttgtctggaaaatacagaatgacgagg

SEQ ID NO: 2 - DNA, 501 bp, Bos sp.
  polymorphism (251)..(251)
tattctcttgtttctctcacttcagctaggaaatgaagccactcgttatcaactggaaagtattttaggaaaatggagtaagggtttgagaaacataaatattaatacatagtataagaggatgaaagttttgaaaacaatgaaaccagataaatactattaaatatcccaaaatcagtacaaagattacttttctactttattatggaaatttaagaaagccaatgaaaaacaaaccacgaacttaatakttgggagagggaaagagaattattggttgcatggaaggataggccataggcctacgtgacattcctattagtgtttctgataggcactcatacacagtaatggagaatttctttgcattaaattatatgtaactaaatataaccaaattgtgccatggctcaggatgtgggaagctagaaaacatatgcactgcaaaattcaacttggtttctttcagctctaaggaatgtgttaaagattctcaagata

SEQ ID NO: 3 - DNA, 501 bp, Bos sp.
  polymorphism (251)..(251)
gctccctgccctgacacacagccttgtgcaggccagagactccatccttccggtgccccctttctgctttgcccacccctcggtagccacagcccggcctcttccaggccctgccttttagctcactccagtctcccagcaagtccccagcacagcctcaagggccataaggtctctccttccaagacaggcttgtcccttttaccatgggatgtaggctgagcctctgttctcacctgtaagtgagatgytggtatcttctgggctaactgtaagaactaaagcgtgaaagtgaaagtgttagtcactcagacatgtctgactctgtgtgactgtagctctctaggttcctctgtccgtgggattctccaggcaacgatactggagtgggttaccatacccacctccaggggatcttcctgacccaaggattgaacctgggtctcctgcagtgcaggcagattcttaaccatctgagccaccaggaaagcctaaataatt

SEQ ID NO: 4 - DNA, 501 bp, Bos sp.
  polymorphism (251)..(251)
gataattcactgtgttgagtgaggtatggagacagcatggtggaggtgagggtgggggacccaaggagccagaactagatggccatccttcgctagtgaagtggctcagtctctaactgcttctaacggggcgtttgtccagatggggcaaatcccttcttgagagcaacatggggtaaatcatagagcaaaaacccagtgttcttgtaaccatcgattattaaatctgaagaattgtaaggactcttacrttttaaaataaagcttttttttctgaaatcttttatatacataaggacctgtgtttgcatataaattttctagaaatctatacaatggtgagcaatggttgccgctgagaagaactgggagactgggggtaagatagaggtcgttatccatgcatgtccctctgtatgtttcagttctgagtgtgtgattgccatattttttcagttacaaagaggtttatttaaaaaaaaaacatattcaagtaattat

SEQ ID NO: 5 - DNA, 501 bp, Bos sp.
  polymorphism (251)..(251)
tctgtgcgaccccatagacggcagcccaccaggctcccccgtccctgggattctccaggcaagaacactggagtgggttgccatttccttctccaatgcatgaaagtgaaaagtgaaagtgaagtcgctcagtcgcgtccgactcacagcgaccccatagactgcagcctaccaggctcctccgtccatgggatgttctaagcaagagtactagagtggcttgccattgccttctccagtaatgtttatayaaagcccttatttcctttctttttcacctcaccatgcagcatgccagagcttagtttcccgtgagcacgtgctaaagtcgcttcagttgtgtccagctctttgtaaccccatggactatagcccaccaagctcctctgtccaggggattctccaggcaagaatacaggagtgggttgccatgccctcctccaagggatcttcccaacccaggaatcaaatctgcatctcttacgtctcctgcattggcaa

SEQ ID NO: 6 - DNA, 501 bp, Bos sp.
  polymorphism (251)..(251)
gctcattatggccatacatcttggccacgtcctcaaaatcagcttcatttagtttttaaaaatttttatatttaaatcttcatctgtttcctgggttttgcttctcagttgtttccaatctcaagaatagatgtaatttgcattttatgatgaaaagcctcatgtttgaagaagtaatatacatagcttgagaatagctgagttagaattccagccctggcctactttactatacaatctagcttcttttyaggatgcaacactgccttcatttttttggacagtaaaaataacatgactaaacaataaaaacttctggtcctatttagaagctatatattttcaccctcaggtcccaaaaaactggccatctctttgtgtaccggcactgtctggtaacagaatgtgtctgctctgaacttccatcgttacatactgtctctgcatgaaccaactacatatagaaacaagacgggaggcagaattaattagagcacaact

SEQ ID NO: 7 - DNA, 501 bp, Bos sp.
  polymorphism (251)..(251)
cccttttagctttctcttctggaatttgcctccatatttctaaattctatgcttattttgctttttggtttaacttaggcatgaaaaatttagtttaaatgaacattcagtgtttatattttgatgccatgtcctattaactcccgagttaagcaaaaagggcattatgatgacacttttgatacacttactggaatttttttcttcagttcagtctcttgtacgttctatttccaaattcactccagacwctaactcagctatcaaaactagctcagtaataatctccctcaagtttcaaaatatatcagataatcaaatcagctttattttcttccatgagctttccatcctgcttcagtcaagagctacttttcccccaagctcactaatggagctgtcacccttttcaagtccttttctggtctgtactcgacacagtttactggctctcttatttgtttccttcttggtttacacccatgagtgtccacagaaaag

SEQ ID NO: 8 - DNA, 95 bp, Bos sp.
  polymorphism (51)..(51)
acgacaggaaagggagccctgctcagctacggtgcctacggctgctactgyggagtgagtggcagaggatcccccaaggatgcaacggatcggtg

SEQ ID NO: 9 - DNA, 501 bp, Bos sp.
  polymorphism (251)..(251)
ccatggggtcacaaagagccagatacaactgagcacgatattttttgcattcttccaatgtaagcatttttttttcccatgctaatcctcttccaggaaaactgcaatcattcctagttgccaaatgtaccaagtcaaaatcttatgccaagcattccaggttctactgtattcaacttacctaaatcaacttactgaatcattatccatcatttcccaaacagcacttacaactgtcacacactcatgaratgaggacctcttttctgaagggatgtttcttaagccaagattatgctctcaggtcacccatctgctaatacacacatgctgccatctggtgctcatgaccatcatcctgttgcagctccaagctctcggatcgcatcgcaccaccgcaggctacacgccactgcaaacgacatgctgctctgcactccagaccacgaaggcatgggaactctctgaacctgcccacatctgcctgggcacctcctgcag

SEQ ID NO: 10 - DNA, 501 bp, Bos sp.
  polymorphism (251)..(251)
ccttcatcgagcactggttgctaagttagactgcgtgtgccaggctccatgccagatgtgggaggtacaaagatgccgtgcttcatgaaggttgcatttaaaaaagcgaggcaggtgatagtcacttagataaaggtaaaatttgtagctgaaatcagtgcttttagtagtagtataagggattccctggtggcccaatggttaggactccatgcttccattgctgagggctcaggtttgacccctggttrggaaaccaaggtcccatgagctatggtgtacagaggaaaaagaagaaaaattaagtagtggtacatgattactaaaggatcttataacaaataatcagacctcatttagtcagaatagcttctctcaggaaatggcacttggataatgacgagggagcagttgttaaaataagagagatgatgggtggatgggggaggtaggtggatggtgagtagatagattgtagatggatggatggtagatggagat

SEQ ID NO: 11 - DNA, 501 bp, Bos sp.
  polymorphism (251)..(251)
actctaaagagtaagagaaactatggccaagttctggaaggtccttccctttaattaaatccatgacccaaccttgaaggacctccctgagtttcactatctgttgggcatgtgtgaatctttattttataagagatacgttcaagattccttctggtggtatttctctctatgttgaattttcttagtgtctgaggttatttttagctgttacttcagtgagcttcaaggttgcacgacctgttttaacygcccgtgtctctgattactccttgccatgacagcattttcgtgtgatgctcgggaaagaaatgagatcttttcttccaggcctttgactcaaagcagaactcttgcatttgtgacttaactccaactcagattaccttcctctgaaagacttgctctatttttcttaaaccaccatacaaacagtgactggaacttgagggttgggaacttgaaggactttgcttgacattccttccccacccacgtttt

SEQ ID NO: 12 - DNA, 501 bp, Bos sp.
  polymorphism (251)..(251)
tggtgagattctctcaccagagtcaggcctagtcagaaaggagaacttcatctcctgcttcaaaacaagcttccagccctgctgtctctcacccccttgtacacagtgctgtatttttgtcttctgcttcccctcccagtcagacctgccatccttcaaagcaagtcaggacttctttctccaggaagcctccctcccttggcaggcgtctctccggtagctcctgtctgactgagatacagtacagagaygctctggaacttccagaggccagttcaggtctcactttcagactcctgcaaagcctgattcctgaggacatcgcagtgactcattcactccctaagcttgtcttgcttttaatttcccagctaacttcttttctccagcaacatatgaccccctttttctacttcagtaacctcagtggtagctctcaccacgttaaacaacggtctgatttggcatggaaaaaagcagtcaattgtttcctttaaatct

SEQ ID NO: 13 - DNA, 501 bp, Bos sp.
  polymorphism (251)..(251)
cactttcatttaataaatgaatgaacccagatttagagaagctaagtaatttacctggcaccatacagttttcattggctagaactacaatcagcctcctgatggagttctaattcagtgttatattctgcccaacaccatacctagctttcactatattatagagaaaacaatgagaaataaaatgttatgcaccttaacagtaaaacttctaacactctattcctaaaaactgggggaaaatacagacygtcaagatattaggctcttgaagatactttcagcctctccctgagtttataggcaggggatctgagtcccacaaaaaaatcaaaatatcttgtttcttctgtttcctgaagtgttcccataacattttctccatcactttcaggatctctaagggaactttgaataatttgacacgtagagtgtcttcataaatctatcattttttttttcctatgagaggattttaagactcaaaggggcagtaagata

SEQ ID NO: 14 - DNA, 501 bp, Bos sp.
  polymorphism (251)..(251)
ttatagtttcctttgaagagcagaatttttaaactttgcactcatttatttttgaaataataaatggcttgtatatttttgaagagtaattttggaatactacccctgaaaataggagatggcaacacaataagttactgtatgtagaaagattaggaaagagctaaagacaaatactagaagtccaacatctattcattatctctctaattttagagctcctaagttttagcagagcatatggttatcaygtacaggatatgttcccagttttctccacagttggcatacccgggtgactaagttctggccaacagggcataactggaaataaagaatgtcatttataggcacatccataaaaggaattatatttgcggtcccttaccttctccttatttcctcattgtggcagacagtaagtactgaaacagcatcttttgtcccaaggatggaagtcacgtatttaggactacacattgccttctaatctcagagaga

SEQ ID NO: 15 - DNA, 501 bp, Bos sp.
  polymorphism (251)..(251)
acttctctccagcgggctgctgctgctgttaaggcacttcagtcatgtccaactctgtgtgaccccatagatggcagcctaccaggctcccccgtccctgggattctccaggcaagaacactggagtggattgccatttccttctccaactccagcgggctagtgtgagcatattttcatgttagctcacgcatgtacttaaggcaactgcagaggagttggagagggagagggcagtaggggccaggacrtgaggaggagagcaacaacaagtggaaacacttgcgtccttttaaaggctctgctttcagcacatttattattgtctcacgacctaagaaagttacaggcaaatccaaaataggtgtgggagggcactactaaactatgcatttagggaggtgtgaaaagttagaggccatcagtcagtctgccatccaatcaatctaccaaagtgctcatccttaaattttattacttgtgacacatgtatgtatatgt

SEQ ID NO: 16 - DNA, 501 bp, Bos sp.
  polymorphism (251)..(251)
attaagaagaggtggcaagaatacacagaactgaacaaaaagccaatgatctggctagccgtgatggtgtggtcacccacctagagccatacatcctgtgaagtcaagtgagcctgaggacgcattaccatgaacaaagatagtgaaggccatggaattccatctgcgctatttcaaatcttaaaagatgatgctgttaaaatgcctcattcagtatgccagaaaatttggaaaacctagcagtggccacmggactggcaaaggtcagtttttatttcaactgcaaagaagggcaatatcaaagaatattcaaactaccatacagttgtattcatttcacatgtcagcaaagcaatgctcaatatccttccagcgaggtttcaacagtacttgaactgaaaacttccagatgatttagaaaaggcagaggagccagaggtcaaattgtcaacatccattagatcatagaaaaagctaaagaattccagaaaacatcttctg

SEQ ID NO: 17 - DNA, 501 bp, Bos sp.
  polymorphism (251)..(251)
ggttttgatctgcattcctctgatgattcatgaagactacacattcttgattacaatgcaaatacagtcaagattttattttctttctctgttcagagcctttttgtgtttgactggctttcacactcttgggcagtgcttcttaagttttattgtgcctatgaaacacctgggaatctttttaagatacagattctgatctatgggtcttgggtgaggctggagacttttacacacaagctccctggtgstcccaatactgcaggcatgcttccttatctgtaaaatgagatgatagcactccattatagttaagggtccttccaactctgcatttattattttcattctaagtacattcatcccaaataaggacctggctcttccttctccagggcaaaggtttgaagttcccacttgcatccggctccccctgccccaccgccctctccttcccccaccccttgctcatcctacctttgatccattgaccaggagtca

SEQ ID NO: 18 - DNA, 501 bp, Bos sp.
  polymorphism (251)..(251)
taattcagtttgcagagcggagggaccagaagcagggtgcctgctttcttaggcaagaagaagaatgatataatgaacatttaacagaacgccatctgattctttgaaatgttttggtaaatattcttctctctagacaggttgagaagtgtgataaataagacctggtttcacgtatgttaagcgttatggctctggtgagtttcagaagctcagctgccattttggatctaagttcctgcagagcccakccttatggcacaccaaactctggtaattcaggagcaaataaaaatgagttatacatcaagcgtgcaggtggatagtccttaatttgtgccttttgttgaagttttctttctgttggcagtgtgaaatgaatctttaaaaacttgagagatgtggctgatgttatgaagagcaaaacgcagaaatactagaacttgcacgttgtggtttttaaaaatgaggcagtgtatgcagaggaagtttctatctgga

SEQ ID NO: 19 - DNA, 501 bp, Bos sp.
  polymorphism (251)..(251)
aagaaaagaatcacttcaactctccattctcctcctttccctacaggaacatcctagagcttctctcagcggaaggtagccactatgcataatcttttgatctcacacagatgtgccctctcttcaagaggatggattcataaagaagacttcccagtgagaagtaaagagttgcccacaggggtctatgtcctgtctcattgagagggtacctgcaaagggacagttccttcctccctataggcatagasgtactccactcccgggccctgctggctcctctcctactagacatacacacagaggagaggagctcatctaaaccaactttaagagatgtctggaaaaatgtcatccaacatccctctacacaggactgtcaccattctcagacacagagccaaaatgtcacaggcagaatacacacacacacacacacatacacacacaggggctcgcacctatcacatccacagatccccaccggactcagctttccct

SEQ ID NO: 20 - DNA, 501 bp, Bos sp.
  polymorphism (251)..(251)
ctcatttcagacttccaaccctcagaactgtaagatcatcatctgtaatgtttttaaaccactacatttatggtaatttgttacagcgacaataggaactaatctcgttgcagacaatgataggggttataaagaagaacaaaataatgagggcatgcctttagatgaggagacctgggagtgacatgggggcagttggctatgtggtgacgtcaggggacagagtctgaggcagaagccaggataagtaygaagatcctggggcagggaagagctttgataggattggctatcctctcaatgcctttccaggagagacagtcattttattgtctgctttccagagcagccactggcctttcttgcagacttctgagtaacctttagatctgttcgtttaaatgcctgggctccctctttaaggactggtattgtgtcttttccttatcccaatatgaggtgctaaggcctcatttgccagtcattggatttggggaaact

SEQ ID NO: 21 - DNA, 501 bp, Bos sp.
  polymorphism (251)..(251)
aggagacacaagacatgtgggttcgatccctaggtcaaaaagatcccctggagaaaggcaacccactccagtattcttgcctggagaatcccatggacaaaggagcctgttgggctacagtccatggggtcgcaaagagtccaacatgactgaagcaactaagcatgcatgcatggtggtggttttttagcatctgaaaaactcaggcatgagctactattatctgggtacttctgagagcatgtgggagyggggtctgtcctgaaaaggcctcactcggttacatcagcagtgagtcctgctcggttacatcagttgtgagatcccaggtcctgtccacattccagcaccaccaacctatcaggaagttctgttcaagatacctccccagccagtccctcagtatgaattcatttataagcatatttttcaactgccaattaggatgattaaaggccagtaacatgagctattaactgattatagaacatttttattagc

SEQ ID NO: 22 - DNA, 501 bp, Bos sp.
  polymorphism (251)..(251)
cagcagctacaggctctaaatgtcactcccctaaggctccatcctgggttcttattccctctagtcctcctgtagctgccctatggctccctatagtagaactgaatatggcttaaagtatgtatttatgtgattaatttcattaactatttggtaagggccaggcatgtgtcagaactccatctaacatctgtcttaccatttagtcagtgcttatcttttccaataagcccataagggcagaggccatrtgtacactgcatgctgttttaactgtagtccctgatatagaacctggaatcacaggtgctcaataaatacagggtgaattaatctagaccaacccccttacttaagagttgagcgtactgagtttctgaacaattagacatgtaacccaagtcagactcctggagagtgacacgcaaaggactatgggctgagactttctgagaaacaacaccgatagtgagggttgtcagccctcagctaataaccatc

SEQ ID NO: 23 - DNA, 501 bp, Bos sp.
  polymorphism (251)..(251)
gattcaaaaatttcaatgaaagtttctatcatgaattaagatatgctacctatgtcaataataacagtgtatgctatatggtgtatggtatatagtaccttaaatatgggaaaatctgaggtttttagataatgacgtaaggcattttaataacttcaaaattaacatgtcaattaccataagttatggaccctagtttgcaggactttcctgggatttcttttctcagtctatctgggtgtttctgcctsacttcctgacagcaatcgaatcctcacccatagttgtaatgtagtgacctgagtatagagcagactgtttctgtcagaactgtggttcaatgaattagtgtgtagtccatgcaaaaataacctaggtttttgaggggttacaggactctcctaatggttggtcatcatctggataaatacatttggtttccattgtcctgaaaaatggaagagtcttagcaaagaactcagctgctcttatttcagaggt

SEQ ID NO: 24 - DNA, 501 bp, Bos sp.
  polymorphism (251)..(251)
aagaagaccagtggctctgttacccagaggctgctagtctatttggagcaagtagtaagcaggcagactggccagaaatttaacaaggagttctgggaatgagacagccacagggaatttcataaattctccacgtacacacccaggactgaccttagtctatgcacatgtgcagcagagaccttagtgggcccaagccaactaatccttggtcaacagggtcagagcctatgcatgtgccaaggagacakgagagagtccagtggaaaataaaggaataacatttgaatcccagtccacacatcaagaaagtatagatgccttattgccttgaggtatgtgaatacaatctctgatcaatctttggctaaactataagctacatggacacaggggaaatcgctaggatgctaggcttaaaattaaaacaagacataatgctgggggctttaagtatgcactactcctcactaagtgacctcctgcaaggtcacttagtaa

SEQ ID NO: 25 - DNA, 501 bp, Bos sp.
  polymorphism (251)..(251)
gccaggcctgtttgacccatggaagctgaagctcgagagtcagtaatgaccaggcagctgtgaatggcagagccaagactgacatggggtctccttgaccgcccagtgctctcagctgcaccacagagcaatccatctgctccaggaaagctgaagtcctgagggctccacaatcataggctccccccatctcctgagatgaagtccttcaggggtctttacggctacatgccatccctgacatccttctrgaaacagacaagcacggtgattttgaaagactccccagaaaagagcatccaccctgctctttcttcacccattctagcatttggtgaccctggttgcctgaaagtgtggttgttcttagatctgagttgaatcatctggtttccagttggtgagatttccaaacagacaaggatggcatccttgatgttgagaaggacttttcagctgagacacacctggtcctgaagctggtagctgaggctgcccggg

SEQ ID NO: 26 - DNA, 501 bp, Bos sp.
  polymorphism (251)..(251)
actcaggccacagacatgaaatcacagagtcctaaccactggaccaacagagaagtccctagacaccgacattttaaacactataccataaatcttttcatcgtgtcataaaagaagctatatatttgactttcatttagcaaaaccaagattcattacagaaaaaaaaaaaataactattttcgaataactattaagattcctcattaaagcttatgagcatttcccccatcagttactgacccgagagrtagaaaggaaaacacagcctctgactttaagcaaaggtgtgcatctgcattttctgcatgtgtactctactaatcagcacgtgtcaacttacacgcaagcagcgcggaagacaagctttggagagacaaaccagggttcaactgactggcctagcggttaacgactcgggggaaaaattcgttagccaccggcgcccgtgtttcattatgtgaagataatgctacctctttgagagatttgttgtgactg

SEQ ID NO: 27 - DNA, 501 bp, Bos sp.
  polymorphism (251)..(251)
gcacattataaccagggccctgtgagactgcacagatcacatgcccacagatcagccctggttagcctataagcctccgtccagcaataaataggttagaaagtgaaaactcaccataagttcaggaggcacaaaatttaacatatttgaagaacaccaaacattctcatgacttttttagttattatttttagggtaagtcacttaggaagttttgttttatcgtaccctttcctgtgatgtctctagcrctctgagaacctagttctgttattgttgcctgagttgcacagaatccctcactaacaggtggtactcaagcctgacttcactgagttcaatctagattttcatgctgccaagttatattttactaagttaacccattaaaaatatactttaatccctttattcataccagatggttaatattaataatgattcaaagtattcagcactcagtgtataactacataattatgttcatgagaaatactgtct

SEQ ID NO: 28 - DNA, 501 bp, Bos sp.
  polymorphism (251)..(251)
agttgacactttatggattttggactttatcgtggggttgaatgtagttcaaggctggaagctgggtggtagccaactggtgtaacaaactgataggggtcagaatggattagggtcaagggtcaagactgagcagatgagaaagcagagcagtacgaggagccccatctagaaactctgggcagacacaggatagcctgtcaggtgtcatcttgcaaagggcagactttataaggaccaagctaagctgragaccagagtgaatttctcatattcattttcaaagtgaaaaaaatgagaaaaataaagatttggacaaggacatataacaaacgagatacagaactagattcacaacacctaccattaacttgctgcttatctcactgtattaattttctcaaggtgaataatctcagtaccaatactgtgctgttgataataatgtaggtcctttatcaagagctggctaaatggtcggctctgtgcttatgtgcatta

SEQ ID NO: 29 - DNA, 501 bp, Bos sp.
  polymorphism (251)..(251)
atgttggatgggcccttgtggttcttattactattatagaatgcatctgagcagcaaccatccgggggctttgaaacaataaggattattagtctcatgtcctgtggcctaacaggacaatggccagtggggaggaaggagagggagcacagacctggagttctgcctttattagagtccaagggtgctgtggtaggcaggaaccaggaggcaggaagagaaatgtagttatctagattccctaaggcttkctagaaaggagaacttcgtggcagagggcgcagagagggctggtctaagagcttccctagaagctgtgatgtatttatgcaagatgggtgtttgaaatggatactttggcaatcagaagtttaacgccaggcccttaggatcaggcattttccatcatgcctcagcatttaatattcccaccaaagtgcaaaaggcctcctttctccacgtcctcatcaacacttgtcagttttcgtagagtgtgaggtg

SEQ ID NO: 30 - DNA, 501 bp, Bos sp.
  polymorphism (251)..(251)
ttagctgggtagataatcagagtaggtctgatctggagacaactacaaaatcccagctagcaaggcagagtatcaaatagcattgatatatgtctatgtagagaaatagtttgtgtcttgaagttggtggcataggacatgaaacctagtccaaagacttcagatctaaattggctaggaagcaaattagaagcacaccttagaacaacaacaaattaaagtattactcagtcttgtccagttctttgtgrccccatggagtgtagtcagccaggcttctctgtccatggaattctctaggtaagaatactggagtgggctgccattttcttctccaagcgatcttctcaactacgaatcaaatcctggtatcctgactaggaagcaaattaggagcaagctgtagaacagtgttggagaaggaaatggcaccccactccagtactcttgcctggaaaatcccatggatggaggaacctagtaggctacagtccatggggt

SEQ ID NO: 31 - DNA, 501 bp, Bos sp.
  polymorphism (251)..(251)
aatatttcttacattgcaaagttcttaagaggtgtcaaatatgaaacagttatgagaattatttgttcaaaagttatgctttgaaagagtatgtgataagaaatagctgtcatcattgctaccaatcagatacttttaatgaataaattgaaaataaataattaaatgagtaatcttaagtatttacttcaacccataggtaatttttaaacagtgatgagaaagtaactgctttctgagggaaatttacsctacggagagagaggaacttggaactagatatttggaagtgatgctactaccctcgtgtgatttttttgttatattatatgctaacaatgacaacaaaactcctaaatatatatgttataaaaacttaacaaaaatacattaaaatattttctaaaatgaggtatattgctttgaaccccttggataaaaatataaaaatgataaaatgtaagcttgaaagaacaactgactgacattcaggaaagtgga

SEQ ID NO: 32 - DNA, 502 bp, Bos sp.
  polymorphism (251)..(251)
tgttgtacttgtggtttcctcttgaacaatgccaatggaactggatagtctcatttccattactgtaaagaatctaatcatctaattgaatctttacaaaaacagagcttggcaagcagtcagactcaggttcagctgctcactgctcaaaagccaatatttgaaaggcaaatgttggtaaaaagaaaagttactttcatcagaaaagccagaaacctgggaagaaggtggactgatgtcccaagaccaaactccaaagattctgctcaaccttgacagtctttaaaggaaaaaaagggggggaagaatctcagtgaatcatcaaggtaggaggttggattctgcttcattctccaatgtatacagactggctgattctttcttcaggtgttacctttcccacgtgtaatttatcttagccctgtggtagaaagccagtcattctttaattacttaattcttcatgtttattttaatctaggtaaataatcaatgggttagg

SEQ ID NO: 33 - DNA, 501 bp, Bos sp.
  polymorphism (251)..(251)
tgaattcaaaacttaagtgtaaaaatcttacttggttgtaataaagagccactggacattttcaaacataacatgataaaagcatctgggataaagaaagcttgaaaaagatatatgatgtgtcaaaaaatcataatgtcagaggcacagaaacagatctaattccaaacacccactttttttttttggcttacaccacggggcttaagggatcttagttcccagaccagggactgaactcaggccacagmcatgaaatcacagagtcctaaccactggaccaacagagaagtccctagacaccgacattttaaacactataccataaatcttttcatcgtgtcataaaagaagctatatatttgactttcatttagcaaaaccaagattcattacagaaaaaaaaaaaataactattttcgaataactattaagattcctcattaaagcttatgagcatttcccccatcagttactgacccgagagatagaaaggaaaac

SEQ ID NO: 34 - DNA, 501 bp, Bos sp.
  polymorphism (251)..(251)
caaaatggacagatctattgccagtgcttcctttttatttttaagttacctaattgcttgggttctgttctcacactctgaaaaagtccttgttgccgctctcccctactttatgaaggcacttaaaactgaggaagaatactggacgcggccccgccatttttttctggttatcggacattacaggcttctgctatgttttctcagttgagctactctttgatttgtgagcaaaggtttaaaaggctaaraggggggaaattggttcaatatttcaggcacaatgaaacatttcttttgtcactttatttccctgctgtattaatttgtggttactcaccttctcctcagagatcccccgggaaccccaaatctgactttctatgatctgacacatgaacccaaagatttctcccaataaattacatctcatgtgtaataaagcataactggcttctttcgaatcttgaaacatgtttcaggcaccactgggccatgttt

SEQ ID NO: 35 - DNA, 501 bp, Bos sp.
  polymorphism (251)..(251)
caggtcttcaagatatctttggctgtactggtctgtttgtgttgtaataacctgtactgatgttttcaaagaattaagcagcagtttgaaatgttgggaaagtgggttcccattctaagtagccagcaccctatttgggacacattaagttggaggtgtttggtggaggtccaggtggctgccatggctcagtaggaacacacccagagtattaatgcagccactctttggaaggtttattacctggctgygtgtcacctttgatgaagggacaatcaaatagcatgaaatatggagcagtagaaaaaccttgtgtcctcatagagactaaaaaaatcccaataggatttgaaaaagagtagctgccaacagagaccaaaacaaaccccttcagggatatctcagttcaacatgttgttaaaatatcccaagacctttctcagcacatatattatgtaaaggtcaaaaaattccttgtgcaaatacctaaaatatctacag

SEQ ID NO: 36 - DNA, 501 bp, Bos sp.
  polymorphism (251)..(251)
attctactttaggcatcttctctatggtcataagttttatttgtgaactaaaagagatctgattgtaagatagcatagtcacaatactgtaggatgttaatactaggtggtgtcagctagcgtagccaactgttcctcctctctgcttccacagtatccagtgaatatgtccaagaccggattaccacattatgactagttttttgcattattctccactcactaattaaacttccctactgacagactgrgtctttctttggtagaaaccaaaatttgtatttttcttactgttcaagtaatataatgaccaatagaaaaaattagaaattccaggtaagcaaagcaaaacaaagcagaaggaaataaaattcacccatgatttcatcattcagggccgacagttttatgcattatgtaaatatactgcacacacattacatacagagacaatcacactttttcttaataaaaatggaatcacacaagtttagccctttg

SEQ ID NO: 37 - DNA, 501 bp, Bos sp.
  polymorphism (251)..(251)
atccctacatcaatagttcttggtgatggtgtatattgtggaaatcaatcaaatgaaagaggaaagacagaaaacagactatttttactaccttcctaaaaaatctgctatgactacagagcaaattggagacacatgaattcctaagacctgctattccagttactgatttcccttctctaaccatgaagccatccaactgctataagagggcttttattttttaacaaacctcaaaaaatatggcacaygacctgactgcttaaagatgtatatttttaaaaactgcaggtcagcttctttcaactcactgctagaataaaaagaaatgccagaaacagaattaaaggattggatggactctcttttgttgcacatttatgttcatttatgaacatgttaactttgcaaaaaatctgctttagcattgatctcccgtgtctggatttaatttttatttaaagattaagaaaggcactaaaagtttttacacccacatat

SEQ ID NO: 38 - DNA, 501 bp, Bos sp.
  polymorphism (251)..(251)
cctctccctgaaaaccccccattttcagggactgaagaagagagtaagcaattctcccattttatagatgcaaaagttgagactaaagaagtttaagtgacaacgtcatagtagcagaatggggactagaacctgggacttctggtcacttctctggctagctcaatgaagagctaagccgggatgccatttccacaactcctacccccacacacatccgcatgtgtgcatatgtgtgacaagggtctgtyggtaaaataactcattgcagtgtgttcaagtggaaaaactgttctagaaccagggcccccttcccccgccctctgtcctgcgaaagctggctaattggatatctcttagacatgtgctgcctgctggtttgctgactggtggtgtgggagagccagggagcctggggttgaagcccttgggtttctagaataggttaatgatggtgattagaagggatgtggtggggaagtgccttacttcctatcctga

SEQ ID NO: 39 - DNA, 501 bp, Bos sp.
  polymorphism (251)..(251)
tgacacacagtaggccctcagactctccaaatttgcttccgtttcccaatatttcattctggctcatttccttctcctgctgtccctcacctgagtacatgcccaatgatagggaaaagattaaataaactatggaacaccagaaagataaatgtcaggcaatcaataaaaaagtcatttaaccaataatttttaacagaatagaaaacactcatatgttcatgtgaagtgcagataaggctaaattattyacactatatcacctcagccatgtaaaatgagtgtccagatgcatgccgggacgtgcaatagcaatttctggaatgatacacaagaaactcttaacagtgttttccccttgggtaggaagagaaagttggagaggacttttcactttataacattctgtcctattttatatgtataaagtaatatatatgcagcatataatattagatcatgtattaatttttaaatacccacccccgccaaatgtagaaa

SEQ ID NO: 40 - DNA, 501 bp, Bos sp.
  polymorphism (251)..(251)
tcagggttccacagctgctccctgataaagccatgataaaaattccaggagcacagatctagcgggtcgtctcagtagaatgaataacaaagcaggaaaattccactttctttattgaggtaagaaacacgtcttagaataggaggcatttgagtttttcacagttgattttaacaaatttgttacttactctatgctttttctcaccaagtaaattaaacacagcaagggaaagagattgaaatacgacytttggatgagtttggctaggcagacattcagaaatgtaccagaaagagaggaaggaccagattgtgggctctaagcattacattaaggcttggagatgaggcactctcctggaaataacaaggaaatagattgaatgatgaatggtatgtcagagttgtgaaggttaatgagttagtatttaaattgctaatacgataggggatctttaaatatgcatatatgagaacatctttatacatgtaactttga

SEQ ID NO: 41 - DNA, 501 bp, Bos sp.
  polymorphism (251)..(251)
tgtgggtgcttaagccacttcagtgcgcatttaaacatttcatttaggagcctagagaggattttgacagaagaaggtctgggagactactttgaaacaaatattcacagatcaaggggactgcttttgcttatgtatgtttctttcatccatttattaaagtatatttttaagtgtcaacaatgtgtcagatactatccttggtgctgtagatacagcagagaaaacaaccgacaatacttcatgcctcrtggtatttatgtaaatacggaagacagtgattagtattatggagaaaaataaatctgggaagatagtgaattctaggggaaggaggtggtgcatttttaaatagggtacacaagggatgctcccctgggaaagtggcattgaatgaaggcccaatgttgcttggcagaaagccactcagatatctggagcaaagcgttcctctcagagggaattgcctgggatgtctgagaaaagtaaagaagactggga

SEQ ID NO: 42 - DNA, 501 bp, Bos sp.
  polymorphism (251)..(251)
atgggtgtgttttcagaaaaggtatcagaaccaggattgaagcagtctgctctcactctatacactgcatgctttacatgtggaaaagaacaagtgtacctcgggagaggctccagaatgagaagacacactgcaagcaagtcgcctgagcacagtataggaatctgctgttctcctgtggaagaaagaatgaaggcattgcaatcgcctggcacatactacctcgagtacgttgaagcccttagctggtrgtatgagaaaaagtacaagaaatatttattgatgacctacaagctaggtgatagaagaggatgggcatagctgatacagattatggatacaaagaacttactcaggcttaaaagccagatgtaaaaccaacttaactatttaatcatcttccatctcccgcactgaactcccttaggccaggaggatgttacacggaaaatgagttcctggttctctctggaaaaggatctatggttcccataactggtg

SEQ ID NO: 43 - DNA, 501 bp, Bos sp.
  polymorphism (251)..(251)
gcatgaaacttcatcagtataatagcaggctctcccaaaggggaagcaaacagtgctgctgccacgtggctgtctgccaagtatgggtgtccttttaccaccagtttatgatttcatgattttttgttatttttacctattacttctttcgcctgaaactttcccattccttcttctcacctagttgaaatcctagtcatatatgagaccttgttaatatatatcgtccctctaaagatatctcttacctytgatgcacatatgggtctaacattcattgaatccacattgttaataattaataaggttagtattaaaatttcctgaattgttcatatgttgttaattcagacagcacataagttccagaagaatatggaggttactctttactcttgttagtacctagcaaaacactggacacagagtaggttcttaatatgtattgctttcttatcatttcaaacaacttttatgactctgtaacactatgagggagac

SEQ ID NO: 44 - DNA, 501 bp, Bos sp.
  polymorphism (251)..(251)
ttaaatataaataatctaaatcaaagttcagcacaaactatggcccacagacccatcctccatttttgtacataaagttttattagaacacaatgatgcttattcatttctatactgtctgtggctgcttttgtgctgtatgacaagttgaataattacgaaagagactatatggctcacaaaacataaattatttattatctattcctttcataaaaagatccctgatctaaacattcctgtgaaaaagyagagattgttggacaagctctaaaagcagcattcaattatatgctgtctataagaaattcattctaaattaaatataccaaagatattaataatagttgttttcattttgctgtataatctctgctttcaacaaattacttttatctggtttttgttggtggtgatggtctcattttctcatgccagtgacagcctatgaagtctagtcattggcagatttctagttagctgcacttatttaagagaagg

SEQ ID NO: 45 - DNA, 501 bp, Bos sp.
  polymorphism (251)..(251)
ttagtggtaagatgattggaaagttactgggaatttcaattaatcttttattttttacccctaatccctctttgattaggtgaccttaacttcagaggctttctccctctgaatataaatttcactgagtgggtatttaggcagcagtatttctggcagaattgtaaaagccttctcttctgagtacatgcctgtgagacatacgtggtagtaaatgaaaccataaactatcagatcattgggcagctctsatttcattctgtctctacataattcaccaggagggtaggagtattgatatttctaaattaacaccctttttcttactaaaccaattacttccaacatgttacagttcatcacctcgaactattttttctccaatcagttcaagacagaaaatccatatgcagtttatcagtgtgtgatgctgtttgcatctctgctgtcaccagtttggattttcatcattccttggactcttagcctgatctcttcgtg

SEQ ID NO: 46 - DNA, 501 bp, Bos sp.
  polymorphism (251)..(251)
atgtacattcctcatggaagcctgcacactctttgctgacacaccccatgcctcagtcaatcttgccatgttagggttgcctttcagatactgtctctctacttgttctccagatttacaccataagaaatatagcaattaggttggtctaaatgggactttcctttggagaacaggattcaggagaggcagcaggggatgggggagcagaaaaaactaagggggcagagaaggagagagtgggtacatayaattacatttcttttacagtgcattcattctccactttattttttcattagcaaaaatgagaaaattctgacttgcttaaagagtcccacccagatcacacgactaatagattttcatgaaaggcaactgtgaacatgatcagcagaatattaaaatgaataatttacctagttttgactagaatgtaaatgactgacattacatggatagctgattttcattatttgcagattccaactttataaaatt

SEQ ID NO: 47 - DNA, 501 bp, Bos sp.
  polymorphism (251)..(251)
gtgaacttacggagggcaggtacttgtgtcttagacctataatcccccacatcagtaaaaatgagtaactaatacgcactcaaatacctactgcagtaataaccaaatcatatcatgaaaaaagatatttcttcacaaaaagaaaataatgcacaaataccagcatgaaacacctgtgcgaaccgtgtcctggtgtgactgaatttagagacagacatttgaagtgggtttaatctattttaagtgaaagkgcaagttgctcagtcatgtccgactctccgaccccatggactatacagtccatggaattctccaggccagaatactggagtgggtaccctttccccttctccaggggatctttccagctcagggattgaacccacatctcctacattgcaggaggattctttaccagctgagccacaacggaagtccaagaatactagaatgggtagcctatcccttttccagcggatcttcctaacccaggaattgaac

SEQ ID NO: 48 - DNA, 501 bp, Bos sp.
  polymorphism (251)..(251)
ttgaagtaggatccagctgtttcttttgtaagaggctatttatttatttactttaaagggaaagccctttctgtcatgaattctcaagtgaaatttggaatggagtcttttctttttcttttttggctgctctccttggacatgaatttgagcaaactccgggagatagtgaaggacagggaagcctcgtgtgcttgtagttcatggggttgcaaagagtcagacacgacttagtgactcaacaacaattycttggtttgtgggatcttagttccctggccagggatggaaagtggacccatagcagtgaaagcaccgagtcttaaccactggaccaccaggaattccctgcaatggagtcttaccatgaagcaaagaagctacagtctgaataagtgtgtgtgtgtgtccaataccccttctggggctcttcacgagtaaaccaggcttggcgtttgctcttaagcaccaagccaggcggagaatgctccagagtgaagg

SEQ ID NO: 49 - DNA, 501 bp, Bos sp.
  polymorphism (251)..(251)
ggcaggcaaatactttttttggtttctaatttaagcagagaatatggtatgcttggattaagggaaaaaaataagaaagaaaaatctccactgttggccccaccagaggagagttgcaacaaaagaggcaggtagcaagtggagaaggaagttggtacaggaaagaacacacagaaccatggagctcctgactttgtctcattaatgcctggacacattttgtctgctgagtggaagaaccaatgcttttyccaaatataaacagtgcatttgataggatacacagccaagaaccgtctgtcgaatgtttgcacatgactctcaggtgttctgtgggcaaagattagaaagaaaggttggctcatgctcctgactgggtcagccatccagaaatgaggcagagagtgtgtaaggcaagaggagggcttagattagaaaaagtacaaacagaaaagtcaacttctggttgagttcctaaggccgagtagaattaaacaggtg

SEQ ID NO: 50 - DNA, 501 bp, Bos sp.
  polymorphism (251)..(251)
acttttatgtggttaagcttataattgggggaacagctttccagaaagaaggaaaagcaagagtgaaggtccttagtcaagaaagagcaatgaatcatcagggaagagaaataaatctagtcaaatggaatattaagaaaaaaaactaaactaaaagattaagaaaaatattatatgatctctgagtgaataaggtatttaaagatgaagttggaaactaattgaagaaaagagctggttttgactctatracatacagagacttctataaatcaaagaatgtctgtgcatcaggtctttgctccttgttttgctttgagttcctggagaccaatttctatgaattaggaccctgggctcccactgccttctggcttctggactatactgtactgtgcatggcgccagcaggtcagaagaatcctcttccatggttccaggttggactcctgtaacactgttccctcctattgcctttccaggcctagagagggtaacagc

SEQ ID NO: 51 - DNA, 501 bp, Bos sp.
ttgaatcatatagcttacataatactttcttcaccctacattgctctctctgcattctctgaacgtcagtaagaactgttctaaagcatttttaatgactacatcattctttttataagattatttgcccattcctcttttgagaacatttttcactattgtaagtagtcatcataattcacatctttacctcctagcctatttgtttttcagattatttacttaggatcatttctcagaagtggatcatrtgttattatttttaaggcccctgatgcataaagacaaaaattttgttgtgtgtttatagatgatacctcttttatggttcatagtagcaaagattggactaaaacccaggcctcctgagttctggtattttagtcctatacttcttttgctacatattatgataaaatagggtggtgtttctttgtttagagaaaattacttcattcttttagtcaagttcattcgcctcccaggaaagaagtgttgtgg

SEQ ID NO: 52 - DNA, 501 bp, Bos sp.
ttactccatcagtcaccctgatgactgtctacacctgacacccttctcagtctgttgtagctcactccaggtgcaactttgcattaaaaatattcatcaactgttgggtaccagagagcaaacatacaggagacagtgtttatcctaaaggaacacacagagctgtgagaattcaaacaaataagaaaataagaataatttaagtaaataagttttataagttaacatataatgttatataaccttacttycccccccaaaagcctcagtcctatcttctcaattgcattataatctatttttgtgcaggaatcacaaaaaacctaaaacagttttcttgaacaacttttgaaagaacagatgaaatgcaattttctttggcattattattaatattttagtacaatgctgggtagaaaagaatcatttctttaactactgaatgcagtatactatatgtaatttaattgacttataatttgagcatatgtattgtattgg

SEQ ID NO: 53 - DNA, 501 bp, Bos sp.
ggagggttagaaatggggaactgagttggaaccaagaacagaatatgatgggtcatgcttattagcaagcagaaaagatcaatgagagaacagttaggccaggattgtttataacagcacagacttgactcagaggggcaaaatttgcaaaaaaatgaattgctaccacttagaatttatatttgtttttgactggtggctctcaaaacgtgacctgcagaccccatggagtccctaggagactatgcaamgtcaaaactattttcacaatagtactaagacgttatttgccccccttactatgttgatatttgtaccatgttacaaaggcagtgctggctaaaaggcttagtgccttaacagaaatcaaagcagcgataccaagctgttagtagtcactgtgttattcattgccatatacagtcatcagccgctctgtattcccacagattcaatcaaccatggactgaaatttttaaaggtttttcttttgaaaagttc

SEQ ID NO: 54 - DNA, 501 bp, Bos sp.
aagtgtggaggcaaaccctgtgagtgtgaatcacttgatcctgccttgttcaatctgggtaatgtggcacaatcccaagaatcctcctctaccaccagatagagaaaggagtcaaagacaaatgctatcatttcaaaacactggacatttttttttcttttaatagtaaattatatgttaacataagctagcagctaactggtaagtcctcatttatgctccctggacttctttggtaagtcaaggtttgyttggaaatgggatgtttgaaatacaccacctgttcttggagttaataattagacttggaccttcttataattccatctgttggaatccatactctggaaaacatagtaacaatttttaccttgttttagggactgaagctccctggttgagacaagctaatgttcaaagtataagctattgatcacattgttgcctatggaaaggtagtaaaatttggggatcttggggatcattaaagggtattactta

SEQ ID NO: 55 - DNA, 501 bp, Bos sp.
tctttttctgttggttagtcttctaggggagtgcgaattttattcttcaaagaatcaatcaactctttgtttcactgattttctctactgcttctgttttcaatttcatggattactgctcttgtcttatttctctgcttccattggcattatttttgcttacctttctttttaacttttaagttctttagatgaaagcttagatcattgatttgagatttttcctcttctccaatgtatgtttttgaagytataaattcccttcttagcgtgattttagctgtgcctcacaaaatttttatacttccattttcattcagttaagtgtatttttcaaaatttcctttgagactcttcctggatctatttacaagtgtgtttttaagtgtttggagattttctgctttctttttattgttgctttttagtttgattctatcaattcaattgatttcattgtacatccatgtagataacatatgctacagagtttaaattttt

SEQ ID NO: 56 - DNA, 501 bp, Bos sp.
aactgttcaacttcagcttcttcagcgttattggttggagcataagcttggatcagcatgatattggatggtttgccttggaaacaaacagagatgattctgtcatttctgagattgcatccaagtactgcattttggactcttttgttgaccatgatggctactccatttcttctaagggattctttccacagtggtagatataatggtcatctgagtttaattcacccatttcagtccatcttatttcrttgattcctagaatgtggatgttcactcttgccatatcctgtttgaccacttccaatttgtctcaattcatggacctaacattccaggttcctatgcaatattgctctgtacagcatcgaaccttgcttctatcaccactcacattcacaactaggtgttgtttttcctttggctccatcccttcattctttctggagttatttctccactgatctccagtagcatattacgtaccgacctggggagttc

SEQ ID NO: 57 - DNA, 501 bp, Bos sp.
ctgccaaggagtacctgagatgacttcccactgcccagcagcactccttactctgtgtgtctgtatggttcatgtttgtgtcaagacaggataagagggtggggcatgttaggtcttagagaaatgggtttatttctggtagaaggactaatagagcaggaactcatgaaagcttcccccccgcccccaaaattgtctgttagtctaggaacttcatagtaaatataaaagaataacgtttttgatcaatyatcatcccccaaagactgcaaaacaagaattaagttcattttccgtgaatcaaatttgtgttgtttcaccaacagcttccctggccaaacagttcctctgtcgagtgtggcctagtggagagaaagagaggagcagcattcctaatgaccagctccaggctttgcttgggtaagaggctcagcttctgtccacaagccaaatagccttccatttgcccctgtttggatcccttgtttggtaaaaaactga

SEQ ID NO: 58 - DNA, 501 bp, Bos sp.
tgatcactccaatccccactcaagagtaagactaaaccaactcaataaagaacatccctggtccccataaacagtctagctttctcctagtgacaggccagtagcaggctatgtagggaaaaggagaagaacgtggatggagaatccttctgtgtcacagggcacaggcatagccagaagctgaaggtggacaggaacattgaggaaaatcctccagcacccaccctaaaacaagggaatgttagaaaaawttgaagcagtgtatggaagataactattgtaaaaacagaatccaatttcaacttaattctcaatgagactgattcaacatcccagcaaaacaggtgtgcccagttccagcaaaaatactatttacttaagtctctactgtttgatacatggtacctggcattcaaatcaagaattacaagattttaaaaaaagaacatgcaaccctctgctaagagacagcagacccatcagaacctcacttagagatga

SEQ ID NO: 59 - DNA, 501 bp, Bos sp.
tcaaaaaggtcatgatttctgtctttcagatgagtggacatttattgaatgacttctttttattaattggaggaaaattgctttacaatgttgtgttggtttctgccctccaactacgtgaatcagtcataattacccatatatcccctctcttgagcctccctcctctccctgaatgacttctttattcaaatcatcttcacagataaagaagacaaacagccccagactacaaaaacctaaaaatttaktagacacaggaagaaatctgtacagaatttactgtaatactattcagaatgagtgcaatgaaagaggcacagacagtatgtaaaatggaattatgtgaagggaatctttgaggaaaaggtagcatttgaactgggctttgataaggaggattcaaatagttgtaaaacagaaaaggtaattccaaatggagataaatgaaattgagaacctagaacatattcagggaataaaatgtagtccagaggaaca

SEQ ID NO: 60 - DNA, 501 bp, Bos sp.
tattctgactttccctgaccatggtgcactgatcccaggtccatgtggcagcttttgatgtggagagtagaaaagaagcacgagaatccagtaacacttgggactgcgaatcatgaccgttctaatatggtggcaaacttgcacttgttgcaaatgctcattttaatactggaaaaattagaaacaaagaatttcagtcaggcaccaaatgttcttggtccagtacagtgtatcaacactgaaaaaaatayagcatttgacttttaggagtccaaagtcaatttggcaggagggacatctaactcaagtagagaacagagaacaaaagaagtcaggatatgattatctgccaaaatataatagaaacagtaaaggaggtcagagcagagagggggaaaaggaacttgcttagcaatagcaaagagcacagcacaatatcctattcgtggtcatttcagatcatgttgaaaaaattgtataaataaataatgttaatctcca

SEQ ID NO: 61 - DNA, 501 bp, Bos sp.
gtgtgtttgagtgtgtctagaaagagagatacatacaagagaagtgaagatatatatatatacacacacacacacacactcacatatatatatatgggtatgtgtatatccagggagacccatatccacatatacaaaacagcatatatggagattaaaatccctttcaagatctatgaaatacttcaagtgaacttggaaggattgaataaaagtaaattagtctctaaacaacaacaaaagtgttagtygtttagttgtgtccaactctttgtgaccacagggactgtagcccgccagcctcctctgtccgtggaattctccaggcaaaaacattggagtaggtagccatttccttctccaggggatcttcccgacccaggaattccagctctaactttcaactggtaggtcctagaaccagaatcattggcgttttcccagaaaattctgtgtctcctctgtcctaccatttcccatagagtatctagttatatatct

SEQ ID NO: 62 - DNA, 501 bp, Bos sp.
aactttccaaaggtaaacaacaataaacaccacaaagtttcctcagtacctatactgaaatatttcttctttgaaaactggaatttcaacagtttgacttaaaaatgagactgaattaaaaaacacagagcagaaaaaatagtgatcttggggtttcaagtttggcagccctctcctttcccctagtagaagcataaatatatatttatccaaagtcaccatccataacccttgataaagagaatagaaakttcataatcttgagttgatttggcccccaaattgaatataattgaactcaaccaataaaaaatgaaataaaaaagctattttagctagaagaagcaatcaaacaaaaaatattcctagccttttgaaaatttaaagtaaattaagagagaattcctaacaaatttggacttggcatatatgtgtaaaaaagatttatttttatatcagtttctatctgaaggaagtagctctgtagcagcaaggtaagat

SEQ ID NO: 63 - DNA, 501 bp, Bos sp.
ctatgctaaacaaaagattttcagtatagatgaaacagttttctattggaagaagatgccagctagtactttcatagctagagagaaaaagtcaatgcctggcttcaaagcttcaaaggagctaatacaggtggtgaatttaggttgaaaccagtgctcgttgaccattctgaaaattctagggcccttaagagttatgctaaatcaactctgcctgtgctgtataaatggaacaagaaaccaggataatragcatatttgtttataacatggtttattgaatactttaagcccactgttgagacctactgctcagaaaaaagaaaaaagggttcaccaactgaatggacatgagtttgagtaaactccaggagatagagaaggacagggaagactggcatgctgcagtccatgggatgacagagtcagacatgacttagcaacttaacagcacagttctttggatctttgagagaatcagaaagaactattaggatttca

SEQ ID NO: 64 - DNA, 501 bp, Bos sp.
ctaggagttttatggttttaggtgttaaatttaggccttcaatgcattttgaatttatttttgtatgtggtataagaaagtagtagtatagtttgattgtttttgcatgtagctttccagttttcccaacactatttatggaagaggctgtttttcctcctgtatattcttgccttctttgtcattaatcaattgcccataaaagtgtgggttcacttctgggctttcttttctgttccattgatttatgwgtctacttttgtgaaaggttgttcttacgaataacagaaatagccccaaattggtgggaaattttttcttgacaccttgctttatctagcaggggactttttgagtccttccttctggtcaagagtgagggctggggcttgacagcttgtgttctttgttttgccctttgactgtggataaaacagccattttctttctttgttgttaaactgtgcatcagacttgatatgtgcatcaaggcaagaatgc

SEQ ID NO: 65 - DNA, 501 bp, Bos sp.
ctatgaccctctctcctaacagtgtctttaaaaatcctcgcctgagggacttccccagccatccagtagactacagacttccactgcacagggcaacagtttgacccctggtaggggaaaataagatcccacatactgcgccttgtggccaataataaataaatttttttttaagtcactggggactttgggtcttttgagcatgaactgcccatcctccttgcttggctcttgtaataaaactttcttcrctccaaactctgatatttcatttgtttggcctcactgtgcgtaggaacatgaacttggattcaacaacaagggcacccaagtgtggtgggagggagccatatgcctgaggagcagggaacactatggtgcctggagttggagagtagcgtgcatgctcagttgctaaattgtgttggactcatcgcgaccccatggactgtagaccgccagacacctctgtccctggattttccaggcaagaatactgga

SEQ ID NO: 66 - DNA, 501 bp, Bos sp.
taagcaacaggctgaatatttctcaacaggtaagaccaggcagaaacagatttcagaaaggaaaattagaggcttagtcttggctatctgagtttgagatgacatgaagatgtcaaataagcaaatatatactttgaatcctagctcaaacaaatggtctggctttgtaataagagtcatcagaatgtgtttgtaattaccaccatgccagaggacttaatgagatcacctaactgttatgagaaaataakattgtctctagtttacctagatcatttttatataaatcaactgagttgtaaaacaaaaacttacatatttcatgtcacagactcctttggtagaatgatgacatctatggacacacctttcataagaattttttcttaatgtataaaataaaatgcacaggataacaaggaaaccaattactctgaaatacacttatctaactataaaaattaaatttaaaatagttatttatttttaatacactaacta

SEQ ID NO: 67 - DNA, 501 bp, Bos sp.
tgtttgcctgctctgtgctaggcatctgagccataaaaatggtactctcatgaccccttttcttattaatagaggtgtgtaaaatcccaaaggctctaatgtattcattgattttatttaaaattctgtgtattgaatttacttagaacagagactatctatagtagtaatcttcagagtataaaaatgctcatttgagaactctatcattgtaagagaataaaagtttgctttttaacaacttcattcartaggaaagtctttttcttgaaaaacgtggatgtcctccataaaccataattgcatatatgtagcataaatattgtttttttattggatttgttgcagaactaaaaccctcttttgtttaaatggacttgcttttgaactgtgaaaatttaatcgtgatagtttattggttcagctctggagaagctgaggcatagctattttgctctagccagagctatttttataccatcactgagagctccttttttt

SEQ ID NO: 68 - DNA, 502 bp, Bos sp.
  Unsure (68)..(117): N from 68 to 117 is uncertain
  misc_feature (68)..(117)
  misc_feature (68)..(117): n is a, c, g, or t
  polymorphism (251)..(251)
gaggagcctggtgggctacagtccatggggtcacctatagtcggacatgacagaatgactaatccctnnnnnnnnnnnnnnnnnnnnnnnnnnnnnnnnnnnnnnnnnnnnnnnnnnaaatatttgctttaaatggtttggttgtctaactagttctaacagctgcctttagactactacttccaagcaaagcaataaaaatctttagggaaaaaaattgatcccataagtataaaaagataggaaggacctccaacacatgactatcttacagtagagaaacggggtcaatttttatagtatttgagagtctattatatcttcaaagaagatgcaccacatatttcaaagttcactatcacaagcttttgcagccaagaagaaagattttagggattaataaaattcctttttttttaaatttaaatagcagcttgggcatattttcattgcatatatcaaaaatcttacacaactgggaggaaagattttagtaacagca

SEQ ID NO: 69 - DNA, 501 bp, Bos sp.
ggttttaagtgaaaatttaaattgagattaattgaaaagttgttttggagctttttaggcgtaaaacaaagctctatttaggcattaaaatatcatccaaataagacctatacagaaatcactcaaaaatcaattaaaatacagcaaaatgtgaaggaagtgatatgttgcactttttcctagaaaaactcaggttggaatatggtagacattaaaatactgagatcacattttatcagcaataccagatmcctaaaaaatagtttcaaacagttaatgtacatggtaatattggtaaattgtttcattatacataaataattgtacctaagatacgtgtcaaatatttaaaaacagtatatctctatttttgtacacaagaaagctagcaataatattgcccagtgatgctgtcccatactactacaatttttttgttttcctggacagtgtgtataaattatattatcagtagtgtaaaaatagctgacttttcttcca

SEQ ID NO: 70 - DNA, 501 bp, Bos sp.
aagccagtgatagaaataaaatcaaatattggaaaatattcacttaatccaaaagtcaggaaaaataaaccaagagtagatggatagatggaacaaataggaaacaaataacaacatggtggattttaaagtaatcatatcagcaattatattaaatataaataatctaaatcaaagttcagcacaaactatggcccacagacccatcctccatttttgtacataaagttttattagaacacaatgatgcytattcatttctatactgtctgtggctgcttttgtgctgtatgacaagttgaataattacgaaagagactatatggctcacaaaacataaattatttattatctattcctttcataaaaagatccctgatctaaacattcctgtgaaaaagtagagattgttggacaagctctaaaagcagcattcaattatatgctgtctataagaaattcattctaaattaaatataccaaagatattaataatagttg

SEQ ID NO: 71 - DNA, 501 bp, Bos sp.
tgtgactatgtgggttgtgccagtatttggttacttttctttttgttatgtgaaaacataatccaaagaatgagtcataatctcaaaatcttgtagtcagaaagacaatttaattgtttcaggtacatttatttttcccaaaattggaaaaataatctttagcatattggaatagaaactatcttttagaacttgatacagaaactgataaagctatttttctttttctttcttttttaaactagaagagyctttaaacacacttaaagcttgtttttacctcattatagaaagaaagctggaagtagatgagcctgaaacattgacttttatccatcttgaatttcatggagcatccagaatgatgcatctttcccttcaaatatttatccatcactttcagacaagtggtgtatgaagcaataaataacagatagctagaacaggagaaaacagttttttaatgccttgtgcttaaactgtcactctggcaggaagtaa

SEQ ID NO: 72 - DNA, 501 bp, Bos sp.
tggctcagaaaagaggctatttatagctgatagctacattcatgattaaagttatttataaaagatttgattttatcatgagctctcagaaaaggccataaatgaattaactccattcatatcacaatgttttcccaccactgatgacttttcttaaagagttttactgtgaccttatcagttactgcttatatttattagctgttttcttatcgccttaacctctataccaaacttgacttaaacctgtragaatttgaaaaaagtatttttattccttaatatccagtagacatctttactcacattaacaatatgcagtttagcaatgcagcaacttgggaagtaagacaaagcctagtgaaacatcatcaccttatgatactcctcttcactcatcgtgctctgccatgtattttatttcgttcatttctcttcttctatgtattttattgcctaatattctttgctcaaaactgaaataaaatcgtaacttagtag

SEQ ID NO: 73 - DNA, 501 bp, Bos sp.
atatgcagtaatcctgattgttattttgctttgctgtttcctgaagaaggttttagctatgtatcaatgtaggcaacatcaataaagccaaggaaaagaaaccaacttgtcacttattatctactcattaatgtggtttaattatataatgaatttagcactataaattgtaatcatctatgatttagccaggtttattcttgttgcacaattattgtaaacacattcattatacaaattaccaaggtaarccagaaagaatcaagttaaattcattaccactagtagaaatagaactcaaaacatttccccttctcttaaatggagttacttatcccttaaagaagtacaggtttctgagtcaacagataatcaaaactactaaataaacacgggttatctttctgaggagtatcagtattgcttagagtttagaagaagaaagtatctaaattttatgctatcataagatttcatcagtcacaatcaatgcagaattat

SEQ ID NO: 74 - DNA, 501 bp, Bos sp.
gagccaccagggaagttgtagaggtaccccattatttatttatctattttcattggagtgtaattgctgtacaaggttctgttagtttatgctgtacaacgaagtgaatcagctatatgtattcatatatcctctccctcttgaacatcccttcaaccctcccctcatcctacccctctaggtcatcacaaagcaccgagttgagctccctgtgctattcagcagcttcccgttatctattaatattttayacagtgtagtacaaaaaagatattcatgacccagataatcacgatggtgtgatcacttccctagagctagacatcctggaatgtgaagtcaagtgggccttaggaagcatcactatgaacaaagctagtggaggtggtggaattccagttgagctatttcaaatcctaaaagatgatgctgtgaaagtgctacactcaacatgctagcaaatttggaaaactcagcagtggccacaggactggaaaggtc

SEQ ID NO: 75 - DNA, 501 bp, Bos sp.
gaacagtgactggggtcggggggaaggggggtcggcaacaagtgccacagaatctcactgttattgccgagaagatattctttaactgaattttcacttgccgtatgcccttaggacaatatccagagactaagtgattattgtttttataattcccatcagtaatggctgtttcactggggattggttctgtagaattcctcatgcctgccagtctgcatatataatgcttttatattagaattgtatayggttcatttccagataaatgtacagatgttgtgctatcatgttcccaaacacagtggagctgcacccttgccttgggggtagatggaatggggaaagcagagttagtgtccagctgccttcaaataacacaaatgccttcagtaagataacacctcagagacaaatagtgtaatcttcaggaataggcaggcctcctttacataccttctgataggaagctgagtaaaaccatgcatcaccaaaacctgc

SEQ ID NO: 76 - DNA, 501 bp, Bos sp.
gggaagaaggtggactgatgtcccaagaccaaatccaaagattctgctcaaccttgacagtctttaaaggaaaaaaagggggggaagaatctcagtgaatcatcaaggtaggaggttggattctgcttcattctccaatgtatacagactggctgattctttcttcaggtgttacctttcccacgtgtaatttatcttagccctgtggtagaaagccagtcattctttaattacttaattcttcatgtttmttttaatctaggtaaataatcaatgggttaggcaaggcatggtgtgcattcaagagagcattaagtcaggagttaggttaaattccctggttaacctcattcctataattaggttcttttaaggtttgagaggaacaacagtgggcaaacaggaagggcaaaggagctgctttcgcaaaagcagattaaaaaaaaaaaaatcaaaaaacaacatcaaaaaggaatacaggaaaagaaaaacagcaacaaa

SEQ ID NO: 77 - DNA, 501 bp, Bos sp.
catagttattgtaatactgccagagttcattatttggaaagtagagagaaacctggatttcatacttctcagtagatcatctttgtgcaggtttttgctaaacacatccccaaacatatgcagtaatcctgattgttattttgctttgctgtttcctgaagaaggttttagctatgtatcaatgtaggcaacatcaataaagccaaggaaaagaaaccaacttgtcacttattatctactcattaatgtgrtttaattatataatgaatttagcactataaattgtaatcatctatgatttagccaggtttattcttgttgcacaattattgtaaacacattcattatacaaattaccaaggtaagccagaaagaatcaagttaaattcattaccactagtagaaatagaactcaaaacatttccccttctcttaaatggagttacttatcccttaaagaagtacaggtttctgagtcaacagataatcaaaactactaaa

SEQ ID NO: 78 - DNA, 501 bp, Bos sp.
attacctggaaataattttataagaaggtgtttgccctcatttgccatttgattactctgtaatacaactgatacagaaagaagcagttcatacaagatagactcttcattcctttcttttattcacctagttttcaagttaatgaacaggttccctgtcatcttcagtaggtgaccaattggtttgtcaaaaatattccaagaatttagaaatattagatggattttgatctactacaatttttatcttyaataaaactaaattttgtatgctaattgtatctcaataaagtggtttgggggcttcccaggtggcactagtggtaaagaacccacctgccactgcaggaaacataagagacatgggttctgctagggaagatcccctggaggagagcatgacaacccactcaattattcttgcctggtgaatcccatagacagatgagcctggtgggctactgtccatagggtcacaaagaatcagacatactgaagtga

SEQ ID NO: 79 - DNA, 501 bp, Bos sp.
taagttttggtgaacatatgcttcagaatggaaatgtcagtccagaagataaaagagagataaaagttgaagattgaaaggtggaagtcatatgctctccaactggataagaatcccaagggaaagaatgtaaaaagagaagactgttaattacagatgctgaaagaaatctatgtagaaagaaagttaatttgaaaaattgatggggtggtaggagaagatgtacatttaaaagctattgagatcttttwaaaaaaatgattttaagatttatatatttggccataccaggtcttagtgaggcaggcagatcgtcagtcttctttttaacatgaaggatcttttagtttcgacatgcaggatctttagttgcagcatgcgaactcttagttgtggcctataggatctagttccctgaccagggatcgaacctgggccccctgcattggaagtgcagagtcttagccactggaccaccagggaagtccccaaactgttgat

SEQ ID NO: 80 - DNA, 501 bp, Bos sp.
ttcctgtaagaagaatgagagttataatatgcaaatatatcatattaatggtatattatatttatttgatgacatcttttccaattaaataggaagaattacatttgaacaaatctcataaattaaacaatgccttcctctgttttgttgaaatttttaataattttatttgattagtgggttactatttaaagaatcctcaaacactatagcttctgtctatacaattgatttgttcatttttttatgaratcaatatattctatagattgcaattcatttgtaatgaaaaactataaatgtattgcaggctgtgccccaaacatacttgctctattgtctgtaccttcttttgttcttccttctccctggatgtgtaggtaagggatgtcaccttacagagaaattccttcagggtctttggaaaaataggaactgagttatttcactcatagcctctccaaccccctctgtcaggctcagctttcctcagtcactctg

SEQ ID NO: 81 - DNA, 501 bp, Bos sp.
tgtatttgaaaacttgttaaggtttattacatttctaatataagaagagataataggtaaaggataagatacaaacttgaacaaaggtcagtaggttcagtctgtatacagaggagcagaaagttatccctgtgtttctgatttaacttagacaaaaaatgggagcaaagaaaggggaagatctagaatttttaagattgaagtgtctaacatttaaaaatacttcaatagttctattataatagttcacmaggcaatggcaccccactcctgtactcttgcctggaaaatccatggacagaggagccaggtaggctgcagttcatggggtcgctaagagtccgacacgactaagggacttcactttcacttttcactttcatgcattggagaaggaaatggcagcccactccagtgttcttgcctggagagtcccagggaccgggaagcctggcgggctgccctctatgggttcgcacagagttggacacgactgaagca

SEQ ID NO: 82 - DNA, 501 bp, Bos sp.
tgttcccagaagcagccccctttctctatcctgatggaagatgtgagtggcctcgggtgcatcattggtatgcacactcagtggtctctggctatggaaaagtaagacttcgagcactcacctttggttttctgagccacgactcctgaaaggcttagcagaaagcagagtcctggaacagtgaaacagaagggagacacgtgaaatggttgaggaaagattccaggatattccccaagggctgggtatcrgttatcgattgctgaataatgataattatttctttaaaaaacaacattctcatcatccaaaaactatgaacattaaataatggagaggatgtggagaaagggaacacttttgcactgttggtggtaatgtaaatggatatagtcagtatggagaacagtagggagattccttagaaaactaggaataaatttactgtatgacccagaaaccccaccctgagcaaaaccataattcaaaaagtcacatgta

SEQ ID NO: 83 - DNA, 501 bp, Bos sp.
aatttacagaaagtgaaaaacccctacgtgattgttgaaataaatgtgacagtggaactgatgatgcaaaatgcaaaattctcatttctccaaaccttcttcatatttatggactagacaagtctttctggggcaaatatttattttgaaaagtgccacttgaacagacaaaattaacttattacccaggtgaaaaaggacaatacaagcttctttggcttaaaaaaaagttgctgttaatctgattttgsattgctgagttgattactggagaggagataggaatttttcctaaggaagaaagaattacctaagaggaaagctcaactctttcctttttgaggctcaatcttataaacaccactctgacagaccagatctttgaaaagtccagtgacataaaggtctccaatgtccccagggaggaactcactgtgggagaaggtagaattgaacaggtgagcaaagtgaaagattaaagtggaagattgacttggggag

SEQ ID NO: 84 - DNA, 501 bp, Bos sp.
cgatgatataactcttttattgtattaatgggatatatttcctagtatttgtttatttatttcatttgactgtgctgggttgccggatcttctatcttcctttgggcagctggatctttagttgtggcatgtgaactcagtagtggcatgtgggatccagctccctgaccagggattgaaccaggctccctgctggaagtgtgtaatcttaaccactgcaccaccaactaagtccccatttcccagtattwaaaaaaaaaaagtgaaattgacgaacagttttcctttacttgtctgtatgtaaatctgcattctgactgcacagagaactcggctgtaatccgtaactttggagaaagtccctgaccggctctagctgcttaaattacctcaggtccaaatcttccgctgccaggtgggctggactctcagccaatcccaacccgctggtcggggagaataaagggaaacaaagttctagtggtcagcgtggactgtctg

SEQ ID NO: 85 - DNA, 501 bp, Bos sp.
taaatagttccagtgccgggttctggaggggagtgtccatcaggtttggcctgctcaaaaaaatttcatctatgacctccttgcagttatgatcgagggttcccacctctgtaggtaagtaggtaagtaggtggtgggattcagtgtccgcacagtctcgaggtggacctgtgggttttcacaaagcagtccctgacagtgagtcatcctggtattggtcagttacttgtgcccttggctgttcatcagcmcagtaacagcatggggaacttttacatttatattttgtcccagtataagcttatctgcttctctgaccaggaccacagtggcagccaatgcccagagacatggcagccatcccgtggccacacagtccagttgtttggacaggcatatgaccaggcgctgctatggtccaactgtttgcatgaggacccccagtgcagtgtgatttttctcatgcacaaataagttaaagtcccatgtcacatctggcag

SEQ ID NO: 86 - DNA, 501 bp, Bos sp.
tgatttcctggtaaagcgtctgcccacaattcgggagacccgggtttgatccctggatcgggaagatcccctggagaaggaaacagcaacccactccagtactcttgctgcctagaaaattccatggatggaggagcctggtgggctacagtccacggggtcgcaaagagtcggacacgactgagcgacttcacttcttcaaagccatatctgggctggtaaaagaatatgccctcagtggatttgatccrtgggttgggaagatcccttggaaaggaaatggcaacccactccagtatcttacctggagaattccatgaacagaggagcctcaagggctatagtccatggggtcacaaaagagtcagacacgacttagtgactcaacgacaacaacatcatcaaagcctcgtgtactctgaatttttaaaaaacgtgtgccaatacatttgttcaagccagtttggcttgcaacattaaaatcctcactgatacattgct

SEQ ID NO: 87 - DNA, 101 bp, Bos sp.
ttaatgtcagcatagtaaactgtgtcgttactgagggggaagtggttgatsggtaattcagtctccactttgtgtattgtgttgtctttatacgcgaggaa

SEQ ID NO: 88 - DNA, 501 bp, Bos sp.
tgagaaacagaccaaaccttccctcacgtacagcctctgtgggagtctggggtgtaaacctcttcgtctggtgttgagttctcttcaggccactgtaaacctaatggcagggagttccttaaggacagtttggggctgccagcctggagggcagggggtggtgaccttgaacctaccagtgacaggagcagcaggtgtcagcttcttaccccttttgcataaacaattcatgatggattcacaggggttgrttatatcctgtggcttttgattttctgaaaattgcactttcatagtgtagagaaaaattgttaggaaaccagaaaaggcaggagcagcaggcaggcagacgaggaccctcagctgacgagtgaggatgggggatcggatggagtgggaataggggggtccacatatggggccctcccctcctgcacactcccccttccatttccatttctcaacacagcaaacacttctgagaaaattaaaagagtctta

SEQ ID NO: 89 - DNA, 95 bp, Bos sp.
atcttaatatttggcctctttgaagagacagcccttgctgctttyctttcctactgccctggaatgggtgttgccctgaggatgtatcccctcaa

SEQ ID NO: 90 - DNA, 501 bp, Bos sp.
cttcatatttatggactagacaagtctttctggggcaaatatttattttgaaaagtgccacttgaacagacaaaattaacttattacccaggtgaaaaaggacaatacaagcttctttggcttaaaaaaaagttgctgttaatctgattttggattgctgagttgattactggagaggagataggaatttttcctaaggaagaaagaattacctaagaggaaagctcaactctttcctttttgaggctcartcttataaacaccactctgacagaccagatctttgaaaagtccagtgacataaaggtctccaatgtccccagggaggaactcactgtgggagaaggtagaattgaacaggtgagcaaagtgaaagattaaagtggaagattgacttggggaggcttcgacatgggttataattcagtgaagaccagaaatacatataaacccaaccattttggcaaattggttacggaagcaagtaatcattaaacttga

SEQ ID NO: 91 - DNA, 501 bp, Bos sp.; identical to SEQ ID NO: 90

SEQ ID NO: 92 - DNA, 501 bp, Bos sp.
tctttgtatgtgaccaaagcatcattagtcccaccaccgtgagactgttgctatttgctactattcacttctgttgccactgctgctgctatccaaactgtcgctgtcttcagtactgctgtcagtttctatcttcccagttgcttatagtctctgacatctgtcactagaaagctggaacatacacagctcgtgaagtaattcggattgtggccgaaagtacactaggaaccagcactggaggtaccagraagagtggtgttcctcctggcctaagattccgggcgttgcctggcaatgctgctgtgtaccccaagttccccagggtgggccctttccctccctgccaccaagctggctcagcttgtacagtaagcgtgtcactggtctccagcttgtggccaactacactcacatgtctgccaccctgtccacttgaggtcttacgcacctctttccctagcatactgcgtaaaaacactgtcttagctcaggctgtgg

SEQ ID NO: 93 - DNA, 501 bp, Bos sp.
ttcaccttcctccattagaatgtaagctctatttatctgtctagttccctattatgtttatagtacctggaccatttctggaacatggtaggtgcccaaatattgagtgaatgaataaatcttccttcaaccccagactgatttctataccttttatcttgatgagtgccaccacccctatcctcagtcccttacctcagaaacttgggtgtaattccagaaacatctgtcactatcaccacatctctgcmtccctttgtccaacagccaccaattccagccagttttttctcataactgtttctcatatctgcctcccaactccatatctgtgattaccaccttgtttcagaccctcaaacctgtctctgggaaaaagaattcattgtactttgttgatgggaatgtaaagtagtacagccaccatggagaacagaacggaggttcctcaaaaaactaaaaatagaattaccatatgattcagctattccactactgggc

SEQ ID NO: 94 - DNA, 501 bp, Bos sp.
ttcctctgaacacattttatatgttaattcatcttcttatggatctattatttctaaaattgccaaagctaaaatagtggcattacataatctatgttcctaggcctataactcaccaaaaattttaacctagaatttactatcattgttcaacttagcaataagtggtcagaaaggcaaagtggcagtcatacaagtgagtctgtgtaaatgtttgcgacatcgtaattgtctgtgccaattgagaatcrggcaaagaattcatccccatccttttacagatatcgttcttaaaaacagaaagtgtaatatgctgaacatttcctatcacatttcccatcacactgcagatattcaattagtatttgttaaaaataattcattaaaattaaattcattacttttcttaatactgattcccaattaagttgtttcggaattctgttcttaattcttttcttgaagtgggtctccttgcaaggaataaagaaagacagaaac

SEQ ID NO: 95 - DNA, 501 bp, Bos sp.
ttagtggcaacttagcctttactttaaaaaaaaaaaaaaaggttcctgtaagaagaatgagagttataatatgcaaatatatcatattaatggtatattatatttatttgatgacatcttttccaattaaataggaagaattacatttgaacaaatctcataaattaaacaatgccttcctctgttttgttgaaatttttaataattttatttgattagtgggttactatttaaagaatcctcaaacactrtagcttctgtctatacaattgatttgttcatttttttatgagatcaatatattctatagattgcaattcatttgtaatgaaaaactataaatgtattgcaggctgtgccccaaacatacttgctctattgtctgtaccttcttttgttcttccttctccctggatgtgtaggtaagggatgtcaccttacagagaaattccttcagggtctttggaaaaataggaactgagttatttcactcatagcctc

SEQ ID NO: 96 - DNA, 501 bp, Bos sp.
ctaggcaagaacactggagtgggttgccatttccttctccaatgcatgaaagtgaaaaatgagagtgaaattgctcagtcatgtctgactcttagagaccctatggactgcagcccaccaggctcctctgtccatggaattctccggggaagagtaatggagtggcgtggcattgccttccccggtgtacccaactatatatccttaaaaatatgtgacacaagtaaagactcaaatatttgttgaatatrtgcaaacaaagaaaatcttcacacctacttggagagtaatagtgaagattagcagaaatcaagggtgagaaataaagtaacatactgcatggtaattgggagctgtcactaaatcttagtttctctcctgttcttcttccttttgtcacaaatattcttcaggcacccgatttctctggtggctgagatgctaaagcatctgcctacaatgcaggagacacgggttcaatccttgggtaggaagatcatc

SEQ ID NO: 97 - DNA, 101 bp, Bos sp.
ttggagctttggtgttcctgctgatgtcatttccatccacatacccccgayctgatccactcagtgttgtcaccagatccgatttgtaacccactgagagg

SEQ ID NO: 98 - DNA, 501 bp, Bos sp.
gggttctgtctttactctttcatattagaaatcttcctttcttaatgattcaagatttttttcttcttttccccaggacacattaaagtgcatggcatgctaaaggtgttcagtattttctgaatgttaaattcagttcagttcccttcaagtcactcagtcgtgtccaactctttgcttacttgccctttaaaagatagatatagtcttaggtttgcttttatattccttaacatcttaattgcatttayagttacagagttatacagctacacatactcatttgtacttgtttccatattatatagatttccatattatttttacttcataatttattccagaatccatatttcaaaatacattgcaaaataaaagattacttgtaaaagtttgataattaagggcttaagttttagttgttatttatttataaataaataatatgttatatataaatgagtaatcattcactcatttaacattcactaatttagtaac

SEQ ID NO: 99 - DNA, 501 bp, Bos sp.
ggaatgctctttttacagaaaatttatgctctacactttacaggcactgcatgttaatgaaggaaataatggctagaagcttatcatatgcctctgggcttgtgtcatgttgcttacaggcatcattcaagcatctacgtagtcactgggtatactactctataatgattgttgaccactaaaccacttcatcatctgcagcacttttcttacagggagaacttgcatgacttttaattaatgcgtggttycagaggatccacactatttgtgattcaaccccatattctgaatgaagactaagctgagttggtaactcttatgacctttgcgggaacatgtatcccttaagtggatgaggaagttaccacatctccatatcccttgattctgtctaggtcaagactacctaatcctttctttgttttcccaggtcttggtggaggttgcacatagcatcctcctttccaatatattgttcagaattaattttcttaggaa

SEQ ID NO: 100 - DNA, 501 bp, Bos sp.
tcttatgaacaaggagatctacaggagccaatcagggcaggctatataatgtgcagggcccagtgcaaactgaaagtccaggaccatcgttcattaattcgaaaaattccaaaatagtgacagcagagcattaaaacaaacccttcttctaagtacaggcccctgtgggactgcacaggggacagccacatggggccgattcattattcgaatgtggagtgtagaacctcttctcatatggaaatggttgyggcatgattccgagtagctaaactgctctctgtaagaatatgacgttcaaaggcagaaagctggactgtttgacttaccaccacatccctgaatacagaataggtgctcacgaaatattttttggcaaaggggggaaatgaggaaacgaacataaaataatttgtatgcagtaagtaggtgcgtcattacagatttgtgtctgctttcaaccttcctctgtaagaaactgacccattcatttcagttcag

SEQ ID NO: 101 - DNA, 501 bp, Bos sp.
aatggagcatctgatagcatctactccctttcttggttcagatcatgaatgtggctcctctcagctctctaagtcaccagcttttgagtatttacaatctgtgacagtacaaagaaatggattttgaactctaagcagcccatggtagaagcagggaagccacagcggaagcaaaaccagagtgggtcctgataacagtgaattttctgtaagtgggaaggagttatgaaaggtggcagagaggagtgacratagatgactaaaagcaaaggaagcttataaagaaagcgggacatttgcttatggatggacaggaaggagagaaagcatcgtgcccagcagccacttagagaagcgtctgcacagggattaaaaaagggctttcttcaagttgagaagaaataaggaagttattctcttgaaaaggtcgtggtaattttaaagctgtgagtgtgtgtatgctcagttgtgtctgactcttttgtgacccccatggactgt

SEQ ID NO: 102 - DNA, 501 bp, Bos sp.
gtccacctaaacccatgtccatcgagttggtgatgccatccaaccatctcatcctctgtagcatatgtataaaattttatcattgctcaggtttgtttgctaccattttgaagagaaaaaaagatggatctaagatcccatgaaagaccatatcttggttagctaaaagacctaggaaacctcttaggataggttctttcatgaaggagtcaaaaaactgtcagtgattaaaaaagaatagagaaagtcaygagtgtgcactgattgcaaaaaagactcttagtaactcttcttaaagttaatgaatagagacctcctatgtggtgtgaaaatattcttcctacttcagttcagttcagtcgctcagttgtgtatgactctttgtgaccccatgaatcgcagcatgccaggcctccctgtccatcaccaactcccagagttcactcagattcatgtccatcaagtcagtgatgccatctcatcctctgtcttccccttctc

SEQ ID NO: 103 - DNA, 501 bp, Bos sp.
gtaagctgtagtttaacaagccctccaagtgctactggtgtacaatgaggttcaagtactgtaacacatattcttaacttttaattccttggctaggaaggtgcaacgaaacaccatattatactttgatcatcaaccagtgattttattaactcttatcttaaactttttctacacattttttcctgttattagaaacataacattactgatttatcctgtggtctttaaacgtgtttttcacccagacrcatgtatgttaggagtttttggtgactcttcaaggtgaggggtgggtgggcgatgggtgtgatttctctgcttctgaaggcacagacaggatctttttgaaataacccagaactcactgactttggaaagataacgagtaatactgacaccgatggcttttataagcaattcttagatgcattcaattctggggaatcctctttgccctagaagaattgagactgtgatacactgagtttataatctggg

SEQ ID NO: 104 - DNA, 501 bp, Bos sp.
tagagatgattgaaactatacagcaggatgcacgttatatgtaaatactatatcactgtatccaacggacatgagcatccacgaattttggtatccatagggcctggaaccaatcccccacagacaccaagggacaactctactttttaaaagactatatcaccaatgtatgcatcacattctcagttaatgagaattaggactgcaacatatgaatttgaggagaacataactcagaccactggctaaamcactggtagtcttagaacaatgtaacaaaatccaccatctccacaaaataaaattcaaatgtccacttcacataccagaattacttgacatatgaagatccaggaaaataaaacccaaccccaggagaaaagtcagatgctagttccaaggtcaaccagatgctgaagttaccatcaggtagagactttaaagtagagcttataactgggcacagtgagacaaagaaaaatgtacctacaaggaactgga

SEQ ID NO: 105 - DNA, 501 bp, Bos sp.
aattgccaaagctaaaatagtggcattacataatctatgttcctaggcctataactcaccaaaaattttaacctagaatttactatcattgttcaacttagcaataagtggtcagaaaggcaaagtggcagtcatacaagtgagtctgtgtaaatgtttgcgacatcgtaattgtctgtgccaattgagaatcaggcaaagaattcatccccatccttttacagatatcgttcttaaaaacagaaagtgtratatgctgaacatttcctatcacatttcccatcacactgcagatattcaattagtatttgttaaaaataattcattaaaattaaattcattacttttcttaatactgattcccaattaagttgtttcggaattctgttcttaattcttttcttgaagtgggtctccttgcaaggaataaagaaagacagaaacagtgtgagcacattatagctaaggcttcccaagtgttgctagaggtaaagaacccgc

SEQ ID NO: 106 - DNA, 501 bp, Bos sp.
cacagccagagaaaacaccccaaaatcgttttccagggcatctgtgcccttgtggaggctgccacgatgttttaattgagttggattgaattgctacggagggagcagaagcagtgcattttcaaggactaataattctgtaattttggaggcggggcatacatttcttggcacaaataggcaaaaggcatctgcattactctacagcaggcattctcatttggaacaagaccaggactgtcaaaagtgcrtgctatttcttcctgactccctcagaggaccctggtggaaatgtgtctagaggggttctgttggtggaaggcatccagggaggttgtccagattggggagcctgtgcgagaagccacgtccagcatcatcgagtccttggttacacactcagcttctcgttggtatctgcacacttcactcctgggtcactggcttctgctgaatccacccagttctcccaggagctgaccacgtgaaagggtcgataca

SEQ ID NO: 107 - DNA, 501 bp, Bos sp.
ttcaggcaaagggaagaacatgtgtagctaccctgtggtgggaaccagcttagccatcagatcaagcagcagaaaggaggtgcctattgctggagtggatgcgaaggaggaggagagtccagtagacagccatctagatctctgctcatcacatgggatcccagtaacaactcttctcttgcatccagaaagtttaaagattctcagggtcggaagggacatttcccaaatgctcccagtctctcttctcyatatactcatattcagccttcactcaagctgtacttaggttcttcaagatgccctcttttagcagtgttataaacactaaaattgttttaaaaacatgcagatacccatatgtaactattgcaaaaattttttttcctgaattgctctcctggaattctagcaccatgttccctcacacttctgtccctttactcagtgttttctctacttgaaactccttcttccaacttattctttgtgtttttttat

SEQ ID NO: 108 - DNA, 501 bp, Bos sp.
gaccttcaagagaagccgattgtttacaggataaaacccagattctataacagagaatgagtctcttcacatcaggccccataagcatctgttacctgatgttctcctacatttaatcttatgaaactattcttcccagaatgagtaatattgttcccttcaactccatgcctttgcaaaattctcttatttttaaagaatgctcttccctgtttgatctgcttagccaatacctactcattttttaagaycctgtgttatgctttctttgatcactcccaccttccccaagcttccttcccatgagttgactatgttcttgtgtcactatctctaacacatatccttatcaaatactgtaatacgattatgtactgacatcttgtctcccccactgtgacaccgagaagggcctggtgggactcctgggcacaaagcctttctgtgcccatgaccttccctgagttccaagggggaagatacaaccagttgttagttaga

SEQ ID NO: 109 - DNA, 501 bp, Bos sp.
attgatatcaagaagtatttaattggggaatgtggtagaggtctgtgttgtcagattgacagattaggattatatctagatgggatatttagaatgcaggatcacaaatgccccttccatttctaaactcggtagtcccccattttgctcttcacgcacttagaatcgggcctctgtaacccaactgaactcattgctgcttgtgttctctcgattgtcgggatactcggaaactgggactgaagtcgctyggtcatatccaactctttgctaccccacggactgtagcctaccaggcttctccagccatgggatttcccagacaagagtacgggagtggtttgccatttccttctccaggggatcttccagatccagggattgaacccgggtctcctgcatcgcaggcagatgctttaccatctgagccaccagggaagcaggatactctagaaattattaataattgaaatatattgaatgcttctaatataaaaagtc

SEQ ID NO: 110 - DNA, 501 bp, Bos sp.
aatgttctaaagttaaatgttatttaagaaagcaggaacacagagccacgttcctcatatactgttgtctttcttcttcactgcttacaaacacattcacaatccttctcaatcacgaaacacccaagatctcaaaaactcagacaataggcatttcccagccccaagaaatgcagtcgagcagggaagacacacaagaaaatgagagctcagctagggaaccatcagagtacagaagagggtgcccagtscttcatcaaatcgctccaaaaaaagagtttttccctgattattccagttcaccacttatttactcttcaactctttcctaagtgccccaaccatttgcctgaaatgcccttcgctggttccttgtaacttcctcacctctcactacaaagattcctctccctgcccgctctagatgagtaaaggctgatcacgcttcctttttttctgaaattctcttttgttatattcagttcaacttcagtttaacaa

SEQ ID NO: 111 - DNA, 501 bp, Bos sp.
ccaaataaaaaatcacaagcctcattatcacagtattgattatatggcaataacaaccctcaccatgagtgaaagcttacactattaaaggattatgagcttatctggatattttttagcatgagtcacaggacaaacatttggaagaggaaagcaccatatatagaaagcaaacctgttgctttttgtcggtgctggcacagccccagctggccactaggtggcagtagtgtcctagcaacagtaaaacygcaagcctagcacttagtgaaaccctgagcatcccacaattgacccacctggctacacacagctttgaggaacagacagaattattagtacaaataattcccctatctcttgatgagttatgtcctctatcacagtagccaggaacgctttcgcttgcatcagaaagcaggctcgaatcagctgcccttgggcggaatctggtcagcagagatgtgtttgcctagagcagtgtttgcttttgttatttta

SEQ ID NO: 112 - DNA, 501 bp, Bos sp.
cagtctcaagactcccccagatctactgagttggatcttgcgttttaataagatcctcagatcatcaataagattcccagatccccttggctaaaaggtgactgcacaaagccctgtctcaaaaggggtgccccatgcttggggtataatgctctgtggtgactgacttgacattcttgctaattttatctttgaaattatattttgtgagtgaaatctggtgggacactgaaacttgtgagggaagcggrcttgaagtcttagttcaaacatctgtagttccacagctttccaggatggccactggctcccctgccccactcagcatccactactgccctgtgccctcggcagggaccttgaacattggtatggtgacgtcaaggtcagatacgaatgccccatgtgctcaatcatgagtgatgctttgggcacctttgaaggcctgtttctctgtcggcatccctgtatgaaagcagcacagtgttaaatggcaaataa

SEQ ID NO: 113 - DNA, 501 bp, Bos sp.
ttttaaaagatgacactttgattttagattcatcagtctcatctcaccgcccccataaaataatcaaccattcagtcaacaaatattaggcatgattgtaaacatgtgagagaaaattaatttaatttaacaaatatttacagagcagtgccagtggaagagatacagcagttaacaataattgactgtctgcctctttgaatttacagtctgtctgaaaacaaacagtaaacaggtaattacaaaggtgrtccagattaaatgtatataaacttaaactgaattgattgatacaaagataaatatgatttagccccctttctgaaggagcttataccttaagtgttgaaagagatatatacaacttactggaatgccaggcaaaataaatcttgtagtcggagcataaaaatagtactttggggcaaagattaggaaatgattaattgggacctcaggaattgcaaaaaaactcggtgaataagaagtcagcctagaagg

SEQ ID NO: 114 - DNA, 501 bp, Bos sp.
aggcagattctttactgtctgagccaccagggaagccttacattcaagcagagggactggaaaaagcaaagatctgagaccaaaataggaaagttggtggggctggagcccagcccatggggacaaggactggaaaagcaagtggaggaccagatcttactgcagactgtagtaaaacactatttataggttcaaacaaaagagctaaaatatctcagtaagatcaaaatgatttattggatttattagcrcagtgatcatttaaatacattttcctacattttgcagtgctaaattcatctataacagaaggataatttaattccaaaggcaaattaaccgctctttgccttctcccaaagtcacccacttttgatatttttttccataacttgattcaattttttctgctcttgccacattttctccagctcctacacacttttttggatggttataacgttattatcttattattagttgctaactggggataattca

SEQ ID NO: 115 - DNA, 501 bp, Bos sp.
aaataaaaaatatcatggtaagtcaaaagatgggagaagaaaggaaaatgctattttcctgctctttggacaaggaatccagcattttcgttttggtccttgtaagttatgctcattgaaatttgacaagctttagtataagagatggagaaggaaatagcaacccactccaatattcttgcctggaaatcccatggacagaggagcctggaggactgcaattggttgcaaaagattcaggcaggacttakcgattgagcgtgagtataaatataagagaaagagcatgggcatgatcagaagacccacatctctctctcgttcatgttttgctggtatgtgacgttgggcaagtcactagacctccttgcctcagtttcctcatctgtaaaatgagggtgatgtcttatgcccctttccaaatgggctgggtctaggttaagggcagacctggcaacatgtctttgagtaggaatgtgtccagaacacctctcatctttg

SEQ ID NO: 116 - DNA, 501 bp, Bos sp.
ctccaaacatatactggggtttgcaagaggcctctgtactgactggggtgcagtggggtgaagcctttcccttttctgaaggtcagccagcatcacaggggtaatgccctccttttgcttaggcccttactttttgtggatttctggcagtacagatcacagcagcctgggaaatacagattatctgctttgtggattacctggagctctaaacctaaagtttaaccagcattcagtgtgtgcccatgatrtcccaggtatcgtcccaagtgctgggagtataaggaggagcactcctcagttctggcccccatcccaccactggccttcacgaaagagagggccgggaagtggcactgtttaatctctgggggaagcccatcctgcagcttgctaacagatctgagactgcctgaggacaggcagagcttgaaaccaccgagcgtaaggagctgtgagttaaggtatctgtcgctgagtattagctatgctgtggatgac

SEQ ID NO: 117 - DNA, 501 bp, Bos sp.
agttaagttttcagtcttatgaaagcagcctcaatgagtgtttctgcctggcagtctcagttgccacactgctttgccaaattatagtttatctgcactgtgttttctggtcacgggcttcagctgagcaggacgagactctgaggactgagacccacatattcagaccatgggtgctccctgggctgctgccgacccactgggtctggaagcacaggggtcacagtgggactaggctagttcttttccayggtggttgctatttccagctcatgtttatgaaatacatataattttaaggctttgccaagagagagccttccctctgtggttgattttcagagtcataattaccctcttattacaagtcagtgttctgggccctgactcccctgggttcttgtggccggctcgtgggacagacagaggtataacactggtcaaatctgctgaccacgctgttccgagctagcagactcggcagccttgtcaagggtttga

SEQ ID NO: 118 - DNA, 501 bp, Bos sp.
tgcttccatgtattgtgataatgctgctatgaacataagtatacaaatatatctttgagaaccagcttttagttgtttgtaatatatacccagaactgggattactgaatcacaagttaattataattttattttttttaactctgatattgttttcatagctgctgtagcattgtaccttcccaccaatgatgcacaagggttccaatctctccacattctcatcaacacttattttctctctttttttwaaaatagtagccatcgtatatgttcatgtataactgattcactttgctgtacagaagaaagtaacacaacattttaaatcaactatactccaacaaaaattaaaaacaacaaaaaaacagtggccatcctaatgggaatagctttgatttgcatttttctaatgttaaacatcttttcacatgcttagccatttttatatcttttttagagaaatgcctatctaattcctttgaccatttttaaattgca

SEQ ID NO: 119 - DNA, 501 bp, Bos sp.
tgcctatgtggctcatatctgtggcttctgttttatttccagtgggtggtgctggtctaagaggtaaggagccagataataacaatcacgtgtgtagcatgctctacccatgctctacaccggacccaagtcattttattcaaccctcatagtaaactcatgcagtgggggtcattatccctattacagataaggcagtgacccacgagtgaaaccaccggcccaaagtctcaaagtgaacaaagtccccmttggtgatgagggctgtaatggcggaacatgaacaggtgggggcgctcaagagaaagcggtcacgccgccccataaggcgaagcaaaccgtccagatggagatgactgatgcttaggctgagtgagcctggaataaagacatccacgtagccaacaagcagaaggggtttcctgagcagaggaagagcaggtgtgaagtctcagaagcatgaaactgcatgaagtgtccagggaatggccgaggaggaga

SEQ ID NO: 120 - DNA, 501 bp, Bos sp.
ctttcagccaaaatatcaatgaagatactacgtgactgaggtttgaaggtctggatattatcattctttttatgaaacagattaactatgtttctaataacataattttaataacaaactgattaaatagtattagaagattcatagttctagcacagaaatgcatacctgtcaaaatgctgcactgtcacttttaagcctagtttattttcatacatgtgtataaaacagtgcagtgtgatggaaagacrgccagaccagtgaaaggagacttggaacgcagctctgctctgttttctcagccaagtagccttgcaaagcaagtcacatgacctccctaggcttcagtatccagatgtacaaaatggtgataagatcagcatgcctccatgcctcagcttgttgtgagaagcactggcaggggaggctgaagggaaagacagcagatatggagaaacctgggcactgggcccctctgaaggtactcccccgtgccctgaa

SEQ ID NO: 121 - DNA, 501 bp, Bos sp.
ttttaaaaccagaacagaccactcagaaaaggtaaaagtataagagagaatttacagaaagtgaaaaacccctacgtgattgttgaaataaatgtgacagtggaactgatgatgcaaaatgcaaaattctcatttctccaaaccttcttcatatttatggactagacaagtctttctggggcaaatatttattttgaaaagtgccacttgaacagacaaaattaacttattacccaggtgaaaaaggacartacaagcttctttggcttaaaaaaaagttgctgttaatctgattttggattgctgagttgattactggagaggagataggaatttttcctaaggaagaaagaattacctaagaggaaagctcaactctttcctttttgaggctcaatcttataaacaccactctgacagaccagatctttgaaaagtccagtgacataaaggtctccaatgtccccagggaggaactcactgtgggagaaggtagaattg

SEQ ID NO: 122 - DNA, 406 bp, Bos sp.
atttttggagggtaaggaccccggtttgtaccttgacataataaatgcacaaagttttgtgcatatttcttacacaaagcttttgcctctgctggttgactgaccatgtgctgtactaaagatgacctgcttggggaaaggatgccacagcatgaygcagaggaaggactgctcccacagacagtgacagtggaaagtggcccagccagtgggaatagctggggcatcttgtttgaggctgtctgactggctccttgtcataaccccaagttgaaggactctccactttgactcatcaaagcctggaaatttttctcaactagatctgtggttgtgaagatttcctgccactacctgtctgaaagattctctcctcatttttcatattcaaggatatgtctctatg

SEQ ID NO: 123 - DNA, 501 bp, Bos sp.
tctgctcaggggccccacgacttgatgagcagagtggagatggaggaggactcggggcacggcagcgcatctgccggctccgaggaggcatccagcacccccgagacaagcagtcaccccagcactgaccgggtggcaagctcccccgaagacaaattttcccaagaaaatatggagtctcgggaaaagttacctgaaactgaccatcgtctctcaggcacaaagtgccatttaaaccaagaagaaagcarctccacatctggagtcttgccgcagcccacaaagctctcatccccaaatgcaaagcgttttacaaaagaagggattcctttaaatcccagtgtccttgcagagtcggtgaaagcccagagtgcgtcagctacagtggatgtagctgtgaaaattaacaagaaaatagtgccccttgatttttccatgagttctttagccaaacgaataaagcagttgtgtcagcaagaacagcaacaagaaagtcaacag

SEQ ID NO: 124 - DNA, 501 bp, Bos sp.
atcccatatgtcttgaagcaactaaggctatacatcacaactactgagcatgtgctgtagagccttcctgccttaactacttaactactgagcccatgcattgcaactactgaagcccacacctagagcctgtgctccgcagtaagaggagccaccagaataagaggcccgtgcaccacaggaaggtagcctccacttgccacaactagagaaagcctgtgtgtagcaacaacttaccacagcccccaaayaaacaaatattcaaaaaaaaaaaaaaacacaaaaaagtagataaaggagaatagtcatttatttatttatttggatagattaaataagctaatgtattggagatatactactagaaaggttactaaaatttgccaaaatactattcaatgtttgctgtgttgactgaagaggctaagcagcattaaaaaacaaacaaagcttcaatacagttgacaattaagcatttaccttgagaaactagtggaattt

SEQ ID NO: 125 - DNA, 501 bp, Bos sp.
tgactcattggaaaagacccggatgctgggaaagattgaaggcaggaggagaaggggatgacagaggatgagatggttggttggcaccactgactcgatggacatgagtttgagaaaattctgggaaatggtgaaggacacggggaagctgatgttctgcaatccattgggtcacgaagagtcagacacgactgagcaactaaactaaactgatctgaactactgaagacgccgtatgtcatccatgttcrtaatctccagcatcccccacttctccatagtcaagctgattttcctggggctgcagaccttgggccaggttggtgggagtggtagttctacctctagatgtctcacggcttccattttctctcctataaaatgcaaagattggttaaatgatctgtaaattccctccaggttcaaaattttgattctgatttgtcatctttggcatcaggatagctctgccatttaaatagagcccttttaattagtgca

SEQ ID NO: 126 - DNA, 501 bp, Bos sp.
catcacttccatttagcaatgaggagactaggctggggttaaccaatgggtgtgttttcagaaaaggtatcagaaccaggattgaagcagtctgctctcactctatacactgcatgctttacatgtggaaaagaacaagtgtacctcgggagaggctccagaatgagaagacacactgcaagcaagtcgcctgagcacagtataggaatctgctgttctcctgtggaagaaagaatgaaggcattgcaatygcctggcacatactacctcgagtacgttgaagcccttagctggtagtatgagaaaaagtacaagaaatatttattgatgacctacaagctaggtgatagaagaggatgggcatagctgatacagattatggatacaaagaacttactcaggcttaaaagccagatgtaaaaccaacttaactatttaatcatcttccatctcccgcactgaactcccttaggccaggaggatgttacacggaaaatgagt

SEQ ID NO: 127 - DNA, 101 bp, Bos sp.
agcaggaagacctgcgtttaatcgggggtgggggtgggagtcagtttggartatggactgttcttcctgggccaattgccacggaggactgtcattgacga

SEQ ID NO: 128 - DNA, 501 bp, Bos sp.
gtgtgtagcatgctctacccatgctctacaccggacccaagtcattttattcaaccctcatagtaaactcatgcagtgggggtcattatccctattacagataaggcagtgacccacgagtgaaaccaccggcccaaagtctcaaagtgaacaaagtcccccttggtgatgagggctgtaatggcggaacatgaacaggtgggggcgctcaagagaaagcggtcacgccgccccataaggcgaagcaaacmgtccagatggagatgactgatgcttaggctgagtgagcctggaataaagacatccacgtagccaacaagcagaaggggtttcctgagcagaggaagagcaggtgtgaagtctcagaagcatgaaactgcatgaagtgtccagggaatggccgaggaggagacagcttgagctccaggagcaagtggagagagatgagtcggcagagataagcaggagctttgcagggagaggcctgcatgccacacacag

SEQ ID NO: 129 - DNA, 501 bp, Bos sp.
ttcctaggcctataactcaccaaaaattttaacctagaatttactatcattgttcaacttagcaataagtggtcagaaaggcaaagtggcagtcatacaagtgagtctgtgtaaatgtttgcgacatcgtaattgtctgtgccaattgagaatcaggcaaagaattcatccccatccttttacagatatcgttcttaaaaacagaaagtgtaatatgctgaacatttcctatcacatttcccatcacactrcagatattcaattagtatttgttaaaaataattcattaaaattaaattcattacttttcttaatactgattcccaattaagttgtttcggaattctgttcttaattcttttcttgaagtgggtctccttgcaaggaataaagaaagacagaaacagtgtgagcacattatagctaaggcttcccaagtgttgctagaggtaaagaacccgcctgcctaggctggagacataagagatgagggttcgatcc

SEQ ID NO: 130 - DNA, 501 bp, Bos sp.
ttgttcaagggacaactgtgatacaatttccaacccccaaaattccctctccctctttcctatcaattcgtaatccaatccctggtaacctggaactgatttctgcccttatacttttcctttttcagaatatcatatacatggaatcatatagtatacaacagtcttttgtgctggatttgatgttaagctttggggcctcagtcttgctattactgatatcagcagatttttcttttaactgctatccrtgtggcattacattgtggatattccacaacttttatattcatttaccagtgggttccagtttggagctttatgaataaatctgatattaatgtttacatactggtcttcatggttgagccacttttgatgttttgattttttttttttccccctaacttcacagttaatgtcccaagcagtggaacattagtggtcttgcaagtccctgggggtataggaggtcttaggaattgaggacgttcagctcaa

SEQ ID NO: 131 - DNA, 501 bp, Bos sp.
ggcctagacttgtaagagaaaactgggtggtcagcacctgtttcactgttgcttctgccttccctagatatgtgcaggtgaaatttgtctgtattcggacccagtcaaacaggaagagagcagcagaagcagacatgtgcccagcatacttgctcctgcggtacaatgagaaactggatagactgttcatcagtgaactcaacacacagcatatacacactgaccccaaaaccactggtcctagaggagaygccaccggcaaatctcagaagaaactcctgtctgcacagcccgcggtcaacaaagaccttggcacagctgcaaagtccccagttgaaccattgttttgcttagacgaggtccagatacccgccaagccagagcaggaggacatcgctccttctgacctggccaagatagccaaagtgatgaagaactttcttaaggtagatgtgggttccatggcctccttcagtgtgggcagcagccaagacctggacc

SEQ ID NO: 132 - DNA, 501 bp, Bos sp.
ttaaaataagtagtcatttatacaaaatactcattttgttaattttgtccctgatagtatccacagaaaagtatgttattggtataattaaaaatgaaatagcacagctatactaaataattacacacatacacatagctacccttgaataacatgagtttgaattgcatgggtccactaatatgcagatttttttcaataaatgtattgggacattttttaaggatcttctacatctgaaaaaacttaawagatgaaccccattgcccaaattcatgaaaagaaaaagttagacatgtcatgaatgcataaaacatatgtagatacaggtctactttaccatttactaccataaagtatatacaaatctattgtaagaagttagaatttattaaagcttatgcacacacagagactttgggaaatcctacatacatggcatcattccctgttaacagaaatgtaaataaatgtaaagatgcagttttaaattataactgc

SEQ ID NO: 133 - DNA, 501 bp, Bos sp.
cactctctgtctcaggtaaccacaaatctgacctgttttttttccatgagtttgtttttgaagtttaatttgacccacacaaaactatatttagttctgggtgcatagcattgtgattttatatttttatacatttcaaaatgatcacaataagtctagctaccacctgtcaccatacaaaggtattgcatgattattgactatattcaacatgctatatatttcatacctgtgactgattctgtttttayaaccgtgtacctgttaatcttcctcacctgtttctctcatcccccagccagcaaccacttgttagttttcttcatctgtcattcttttttatgttcatttgttctgttttttagataacacacgtaaatgaaatagtatggtatttgtctttgatttatttcacttaggtccttccatattgttgttgcacatggcaaagtttttcttttttttatggctgagtaatacacctgtgtgtgtgtgtacaca

SEQ ID NO: 134 - DNA, 501 bp, Bos sp.
agaccataaaaactcaagaaatgcttgaatgtttgtactttgttagtgctttaaggtaatttaaagcagagagatttttgtatctggagctttgtgttctcaactcatgatttaaaaggttctcaaaggcagaaattttaaaaaaataatcatcttgaagccaaaatgtcagttataacacacatgaacatcagtggaatcagcaatagaccgcctatgctgccccacatttctgaactgaactgatgctrccccacatttaaacaccgaaatgtatatagaatgagattactgtctatagaatggaaaagcacatggctcacctcagactgtggtgactccccctatgtggcccagtcaaggcgagcactccccatgtattccagtgccatctgctgaagccctccctctccccagcacagctgagcaagtgaaccaaaagaagtggctactttcactaccttctgtctgggtggtgaacagaggtggcagagagactta

SEQ ID NO: 135 - DNA, 501 bp, Bos sp.
actgctgggtcatttttgttatggtaatgaatgcatttagtcctcaaattgaaaaaaaaatgtatactgcttctttttataataagatttatttttattatgtagtcctttgttaatcttaactgggagatggttttcttcaaatattattggatccacatttagaagggcctgctttacaaagtacgggctgataatgttttccaatcaacaaagcccttgaaactgttcagcttgttagacatctgctrttgaagagtgtatccagctctgaaaacaagatgcaaggaaatgcagtcctcattttctccagcagttagttgctcaaaggactatagccatttcaagaggtgctagacgtgcatgcataaggcttgatcatgctaacaatgaagaagtataatgagcatttatggtttgaagagtttcaaaaggatgcaaatcagtatcctatctacaaggataaaaatatcccatgaagttaaagagcagtttgtagat

SEQ ID NO: 136 - DNA, 101 bp, Bos sp.
ggctttctgagcaagaacctcctgacaggactgagtaggggtctagatggkttgtttacagtactggagagaaatccaagattgaggatgagtccaagtca

SEQ ID NO: 137 - DNA, 501 bp, Bos sp.
cctttcatctttcttaaagtgtcaagagctttcagatacctcactgttctgaatactgctctgtcaatatttattttataatatttatagtgtatagtgttagagaaattatttcaagtgtgaactgcatagtagttcctgacgtgagattttgaaaaacacaatggataattttatttatctggacatgagtctttgataaacataatgtattaccatgtcatgctaatattttcagaggtatgatcagygtgttgacacatgctgagcttgtcatagtcagcaaagacacaaaaattttctattcaaaggtgctatcatatcattttgattgttttatcctaactagtaaaggtggaaactggcatttgttccttttaaattgcataatattgatttagttctcttgtttttaaaacaatgatttgaaatgttatagacactgaatctgaggggaaaaaagaacaatttttatattcaattcagtttagttcagtcgct

SEQ ID NO: 138 - DNA, 501 bp, Bos sp.
ctggagtcttaggaaatgcaagtaaataaattactgcctatatttctgtcacaaatggcagccaagctctttatctctgaatttgctcccttctctttgtaggtcaaaaggagtccccagaacactaacagcaatcttgttactacttcatgaatacagatgatgttcatttcctgagattgccaatctttactccaaaaccctagatcctgacaaaatcaattacactttcaaaatgtattactcaatcwggagactatacaccaggagaatgcatctgacactcactgatgtttgatcctctctaagttaaaatcctggaaacaatattccaaaagagatctttgctatgagtaatatcatcattaacagtgaggtacatggagcttattttgaagctataaaagaggatgacaaaaagcatatatatatggaaacttggagccagagaaaatcagatggtttttaacaagctatagcagaagaaagaccacatttttg

SEQ ID NO: 139 - DNA, 501 bp, Bos sp.
ctttatcccagtggtcaaaaccactgcatgacctttatccttcactgctctagatgcctttagcactgttgagccctcctgatgaacactgacgactccctcattctccatgaagcaagatgtcctggttctcttggtgactctgtgagactgctcacttgcagtctcctccacagtcagctgtcactagcccattacctggactaacaccatatgaagatacagaacatctggctgtttctacttcctgygatggcaccagacacacggggtcaagggcaggtggacagagaaggggctcagaaaagctggtgatgctctttattcctgacttgaaaaccctcagtgctctggatctggaggagtcaagtggctgagggatctttttagcacttagtttttttcaagtctcacccaactgtggggtgaaggtgggaaggagtcggccacgtgtgtaacttgtgcaagagggaggccaaacgcagcactcaattgttcttg

SEQ ID NO: 140 - DNA, 501 bp, Bos sp.
tattagaataattatttattggacacattttgggcttcccaggtggcaacagtggtaaagaaccctcctgccaaagcaggagacaaaaaagaagtgggtttgatccctgggtcgggaagattaccgggaggaggacatggcaacccactccagtattcttgcctaaagaatcacatggatagaggagcctggcgggctaaagtccacagggttgcagagtcagacatgactgaagtgacttagaatgcacrgacgtattttgggggcagaatcacaataaatgtctagttcaactctcaggcaagaataatgtacatccagtttcaaacattacatgaaagagacttcacagctttcccctaaatgcatttgaagataattttcttgttgttttaaaattcatgaactgtaacagtcacctattgaagaagaatgaactagatcaactgtatagatgcgtatcattcagatgttcagaaaaatatatttgtactagagttt

SEQ ID NO: 141 - DNA, 501 bp, Bos sp.
aggagtggggatactctgagaggagggtcagcaaaacagacccacccatgatggacacagggcacccgaggtcctcgggaccaggggatgtgagggggaggtcaggggtccaccggaggggcactagcgaccgtgcaggcctccctggaacagtgagtcagggcatctgttaggtcacagatgacctagtgaggctacagagtctgaggattcctgggttacttcctctctatcaaggacttgtttaccgmggagccctgagaatcctgtccatacatttaacatccagcggctctcctaagatgctcagtaggaattgatcttggactcttggctccttagagcaccatctgtcctttaaatcttgtgacccgatctcccatttttaaaggactgtcacagatcttttgcacgtttttgtttgggccttgctttgtcccctcgtccagaaacacaacaggcttctgttgtaagggctccactcttctgcccaccatctac

SEQ ID NO: 142 - DNA, 73 bp, Bos sp.
ggaagcattcctggcaaaaatgcagctgagtatgaggtgatcattgtgatygagcctgggctgctttttgaga

SEQ ID NO: 143 - DNA, 501 bp, Bos sp.
agacaaatgcagggtctcgtgtcaaaagagctgtctggagcccaagacatcgcacacatctgccttaaaggcttagagtgggtgcagaagacacattaagctcccctgtgtgtgggctcatggaaacaaggatttcagatctcaagttttcatctgactgccttctaggtgagctctgctcttatttataccatcatgaccccaaacaacattttaaagcattctagtcaagaagaggtgaccaacccacrcatttctgggcaactgattttcagcataggtgctgagacatttcagtaggggaaagaacagtcttttcaacaaatggtgctgggataagtgaatagttccacgcaaaagaatgaagttggacccctatctcacaccacataaaaaaaaaaattaaccccaggggatttccctgttggtccagtggtaaagaatccgccttgcaatgcagggaacatgggttcaacccttggctggggaactaagatccca

SEQ ID NO: 144 - DNA, 501 bp, Bos sp.
tattgccttggagaagcacccagtggcaattacgctttgagatgagatttacggtttataacccatagcagatctaacctttggaagagacagggaatgacagctgggacagacagcttgggtacggtcagagcagtggtcggtgttctcgccacgactccagcattatagccaacaccggctggatggacttccagtgtgagtgtcacgaagccagaattaaatggcatgttatacttatgtcccaagcrtcatacaatattgatctttttattgtaactataattttctgagggctgtgagtaaatagattttttttttgtcacaattatagtaatccacttgaagcttactgttgccgttcaatgatagtggcaagcgtttatttttttaataataattctcacatggtttcccttccagattttacacatagtaaatgaaaaagtaagcccactgaattgcctgtgtcttttgctggcatttaggataaagagaaat

SEQ ID NO: 145 - DNA, 501 bp, Bos sp.
tttcgcaaagagagggctgtgttggcagatgcagagaccagctccccagatggaataatctttttcttattaatttgctgtatgttgcttctcatttctcacagtcactccaaatgtgttacaaacgactacatgctctgggtcctgaatccactattgctatagctttgggaaaaaaaaatattgactgtcaactgcagtgagctttcccagcacttttttcgtgctcgatttttaaattaacattaccrtctcccaccactgaacactgctccacctgggagcagccattgctctggtgttttttaggaaacgacagtctagatggtttgagtgatgttttcagggccctggaaagaggtcgaggtgtggctgggattgaaactcacagttccaacttcttgggctgtggagtcttcctattgtctagcatatgaagcaggctgtttactcccttcaggcaagggattcatgagcattgcctggagagcttgttaaaaa

SEQ ID NO: 146 - DNA, 501 bp, Bos sp.
agcaactcaaactaaaataggtcaaaagcaggaaaagctgaaggctttccctaaatcacacagaactcaaagcacctaaagtaatctatgtgaagataaaaagatgagtggcagatggcatcactctgccagagatgggaagttaaaataaatagcaaccaaataccaaaaacatgaatagacagaaaaactcccatccagatgtcggtgtatttgaagcacagagaaagtggaatttggtcctaggcaarggcaacaccccaatgccctggcttcttctgcatcccagctggtttccctttctgacttccccttggtatgtgtgtccctttctctgactgttgtcagagggatgggtattttcctgtgttcattatttccagagcagacagatttgcattagcctcatgtacttctaagcattggtgtcagcagcttcttgtgctccagatcacatcctcacgacccgcattttttacagcaaccagcttggtgaaggtg

SEQ ID NO: 147 - DNA, 501 bp, Bos sp.
aagatatctcacaactgatgatgcacatcttgtgattgacagactgtgggtgttggtcctgccctctgtagtgttaccttggaaaagtatgtgtgacagtcaccaagcaccaccagcatccacggtcaggcaccagctgcccactcagtacctctcaaatggaagcagtggaggaatgggttctccaaggagttgtccacccagtctctctttctccaatattgcacccatccaatctatccaattctttsaaactgaaatgctcatcaggcctctccctggtcccttcagtttggtttgcaaggccctccgtgataggatgccagcttagtatctggcctcatctccctcccctgacttccattccatatctttgatgggctattccttctcatgcctgtaagctgccacatgtgtcaatccttacatagggatttctacatttctacatagcacattttctactttttttttttcacctgaaaactcttatctatccct

SEQ ID NO: 148 - DNA, 501 bp, Bos sp.
gaatgcttccttttagcctttgcgataatcctacttaagtgcatactgttatcagtcccattgtatagctgaaggaactgattctcagcaaggctcttaaagtagcttgcataaggtttcacatttcagaagttatggagcagttcatgagtcatctgatggagccagtgcctttgatctcacattctcagctcacttatcttagaagaattaaggtggatttagactcaacacttgtttctttaagatgyaacagttgttttaagaacaaagctagttacttgagctatctgtatgattattccatgactgaggacataaattcacattttagaaagtgtggctgcatatattctttattaatcaacttgcagaagaattaccaacctgaaaaagtttaattgtagaggttaatatcttcctctgaagtttgcaataaggagttcatgatctgagccacagtcagttcctggtcttgttttgctgactgtatagagcttc

SEQ ID NO: 149 - DNA, 501 bp, Bos sp.
cgattcccaatttctagagtctggcttatcggtctataaaacagggagtttagattctaacatgagggccatttccttcgtaggtgggactggtcagaggttagcatgagaagactgctgagacctgcccgccaggacatccagggcacctcacttgagagccctgccttgggaagtgcttctccatctgtattagcatcatagcatctttccatctgcatttatgatgtgattcacttctgagcagctcsattctatccatggagttttcctgctacttagtgaatcttccttgttaccatgttattgattccccccacccccaggagatagctgtactatattgcataataataagatgactatttagtgttagctcagggcctctaatgaagcaggcgtcaagatggaactaggcatggagggatttattggttgaccttcctgtggaggacacagggcagtgggggcaggggtaagagggaaggccattcagacatt

SEQ ID NO: 150 - DNA, 501 bp, Bos sp.
tggaggggagtgtccatcaggtttggcctgctcaaaaaaatttcatctatgacctccttgcagttatgatcgagggttcccacctctgtaggtaagtaggtaagtaggtggtgggattcagtgtccgcacagtctcgaggtggacctgtgggttttcacaaagcagtccctgacagtgagtcatcctggtattggtcagttacttgtgcccttggctgttcatcagcacagtaacagcatggggaactttwacatttatattttgtcccagtataagcttatctgcttctctgaccaggaccacagtggcagccaatgcccagagacatggcagccatcccgtggccacacagtccagttgtttggacaggcatatgaccaggcgctgctatggtccaactgtttgcatgaggacccccagtgcagtgtgatttttctcatgcacaaataagttaaagtcccatgtcacatctggcagccctaatgctggagcgttggtca

SEQ ID NO: 151 - DNA, 501 bp, Bos sp.
ctgctcagagatttgtgtaaaatgacaggtggtttagtaagaaattcagcagtatcaggaaattctataggtgatcggttagctggagagccagcagacactggtccatgactgggtgaattcatgcttggtaaaccaccttaaaaattgaaagagaagaaagagatattatgtatgcatgtatctgtttattgtctatgtttgggtacttataaagagcattccccttctttaaagaaagcaaagcattwacaattaaatgataaaactacatttctacatggagctatcatcaagacattctacgaattccggcagaatatagactatatttgttatcatcaatgaccgtggaataagcaccctgtggcaggctgacacataacagtaaatactaagagtacgaggaaaacgtacataataatgataataacgtgtgtacacgataatgtgtggtacagattttcctaatccatattgatcttcatctgtcacattttg

SEQ ID NO: 152 - DNA, 501 bp, Bos sp.
gtggacacagtatgtaatgtcttttttctttttattttttcactgctcttcaaatgcccttcccttcaatctgttataggtcttcctcagaagagtcccttgtgccataaatttttttacttggcttcttgttaagtcaggactactcttcacgctgtgcacccatgaaatcattgtcctgcggtagaccttcaaagaagccacatggtctagcccgaggatctgcccttgttaattgggagttagtccgyccaatgacattcttttgtgttacgtgacctggtaaaaccatgatcaaattcacctcctggcccacctggcatttccagggagggactaggattgaatcaaggaacaagttgcattaagtcagaagtgtgttccctttccatctgctttgagacagaatccttcagtgatacagaatccttcaatgatgtagaatccaagccttagaagacgcgaggtggataagaatcgactcgggccacagccaagaag

SEQ ID NO: 153 - DNA, 501 bp, Bos sp.
tttaggtcatacctgaatggtctagtggtttccctcactttcttcaatttaagtctgaatttggcaataaggagttcatgatctgagccacagtcagctcccagttttgtttttgctgactgtatagagcttctccatctttggctgcaaagaatataatcaatctgatttcagtgttgaccatctggtgatgtccatgtgtagagtcttctcttgttcactatgcataataaatctgttgtctgaatatytgaaatccataaccagagtgaagacttatctgataaatatgcaagacccagctcaagagcaaacagtggggcaaattctggcatatcatagccacaataatcctaagaagatcctagatacactatggaacataatgaaccagctgaccaaatactacgggtgtcaatttggcactaataatctaaataaataaaagattcacacattagaatttggtatatgctgagaagtatttatgttgaagctgaa

SEQ ID NO: 154 - DNA, 501 bp, Bos sp.
agtccaatacatattgttgtaaatggcaaaatttaattattctttattatgattagtgggcttccctggtggctcagaaggtaaaagaatctgcctgcagtgtgggagacctgggtttgatccctgggttgggaagatcccctggagaagggcatggcaacccactccagtattgttgcctggagaatccccatggacagaggagcctggcaggctgcagtctatggggtcacaaagagtcagtcagacaygactgagcaactaagcccatgatgagtagtattccattgtgtatgtacactacatcttctttatccattcatctgttggtagacacttccatatcttgcacttgtaaataatgctgctatgaacatgggtgggcatgtaccttttcaaatcagtgtttttcattggatatgtgcccaggagtggaattgctgggtcatatgataattctgtttttagttttttatgaaacctctatactgttttccagag

SEQ ID NO: 155 - DNA, 501 bp, Bos sp.
ttcaggatggcctgagaaatgctcccactgtttccattagaaggtaagatgatcaaaccgttagagggtgtgctggttttctgggcttcatttgccacgggtagcactaaaaccccaggtcatcactgctgcctctcttccaggctgctcggtgatttcaatgagtagatcaggattcagggtgcacagcagttccaaaatatcatatgcccttgctcaacctggtgtgtgaattccaatcccacccccasaattcaccattttccccagatggcccactacttccctcctccaaataggaagacccaacaggaccaaacagggcttgcagtggcccctgtttccagagccaggattcccaagccggtgttgtacctgattgagcaggtgccaggtctgatagtcctccttgctacagtgtcggctgaagattgatttgtagtccaccttcaccaactgccattccgagcggaggctgaagtggccaaaaactctaagtgt

SEQ ID NO: 156 - DNA, 501 bp, Bos sp.
cctgcaatgcaggagacctgggttcaatccctggattggaaagatgctctggagaaggaaatggcaacccactcctgtattcttgtctgggaaatcccatggatagaggagcctggcagactagagtccacagggttgcacacagtcggacacgacttagcaactgaacaataacaacaaaaaattactagaaaaaaaatttttaaaacatacaaaattcaagcctcaatttttattattagagtcaacawacataaaattatttttgtcaaattgctttaaaatatttggcaggcttcctttccatttccatattcaccttttggcaaaccagtaacacatggctcacagactggcctgctctgttagtcacatttgaaagagttgtaacatggatgtgactttagtactttataccaggaagaaatggacttaaatggccctgatgaggacccctgatagaatatactttgatgaggctaagaaaaaaaagagagagag

SEQ ID NO: 157 - DNA, 501 bp, Bos sp.
cttctcatacctatttttgtttctggtgttgatagaattgactggtttgatctccttgcagtccaagggactctcaagagtctactccaacaccacagtttgaagacatctattcttcgaccctcagcctttttttgttgtccagctctcacatttgtacatgactactggaaaaaccatagctttgactacatggactttggtaggcaaagcaatgtctctgctttttagctgtctaggtttctcattgyttttcttccagggagcaagctccttttaatttcatggctgcagtaactgtccacagtgattttggagcccaagaaaataaaatctgtcactccattcataggtagctccaataggagaataattcctttgataaattttacttttgtctactattaactacatataaggaaaagttaatggatttataagacagctatttagtaatcagatttttaaatggtatgctattacattttgaaaatatagaaa

SEQ ID NO: 158 - DNA, 501 bp, Bos sp.
aaagattggtcctcaaccctgagcttcacccacaagaaatttcacccacactttaatgaactagtcactctgcccccaaacacaaaatggaattttattttatttttttaacaccaaaaacattttgtattggggtatggctgattaacaatgttgtgatagtttcaggcgaacagcgaaggaactcagccatacatatacttgtatccattctcccctaaaccctcctcccatttaggctggcacataakgttgagcagagttccaacaaatggaactttatattcaatacagatgtccatgtttattgtcaaattgccaagaaaatattccccattaccctcttcattaaaccagatattataaatgaggaaagaagagtgttaagatcagaactgtatcgtccaggaagcacacttggtttgtctgctgccaagtgtggataatatgcctatttggtacacactcagcattcatgttctgccaagcaggcgtgagctt

SEQ ID NO: 159 - DNA, 501 bp, Bos sp.
atattaactgtttatctctgcttggtggggttatagtttatttttatgtaagcttttctgtattaaaactttattttcaatgggaatgtaatactttatattagacatttaggttttttaattcctaattgaatatgtttgatagcttctattttggcacatgtcagccctatggagcgagggagcatcaacctagaattcaaacaagttttaccagtcatttcacccgatctgtaaaatgggtacaattrcatctacttcacaaggctgtgtgcatgtatgtgtgtgtgtgtgagataataaatatggaatccctttgtaactccaaagcttgctaaaggtgtcagctggtattataatgatgataaagtcctgtgacctaaaagaggtgagagaacccttatgataacaggtaactttgtgctgagagaggagggagatctaagtgtgaggacaaaagtgaaaatatgtttttttgccttaaacaatcacatgcctgac

SEQ ID NO: 160 - DNA, 501 bp, Bos sp.
ttttcactgcaacatctttgcaacttattaatagccagtcaatttcattgtccttcaatgtgtttcatccttcatatttatcaaaagtatgcatcattatcctacccagagtaattccttccagtggaatatccttcctactctccaccagtgagttttagcaccactttttacaggaactgtgtctcacatactacttgggatggcaagcgatccactcctcagattccaatcccacttaccaggtattyaggacactcttagcaactgccagtttagatcctctagaaaggtgatactgaaattaaatttgaagtgcaagagggtggtggtggttgttgttgggttttggaggaagaaagtggtaactcctgtaaaatataaagggaggacatcaaaatggttctgagaaaagcttaagaccataatactgatctgtgcatgtgtgtgtgctaagtcacttctgttgtgtctgactctgtgtgagccccatggactata

SEQ ID NO: 161 - DNA, 501 bp, Bos sp.
cttaactaaatctaccattttagtaggtatgtctttatttttccaaccttgcaacagtttagccatactttttcagccattacataatatggaatgccttttattcagggtccatttacaaaatctcactgtcttccatcctttgctaagagtttccttgagatactcaaaagctctactctctcccttatcctaaacaatgtcaaacattatagtttttgttatagcagcatttaaatcttgggtgttcrcttctgtctggattagtttttgcagcataccaagttagcctaagatttagtagcctaaaatgacatcgttctgtgagttgactactgttgattgagtggttcaaacttcgagtttcttatgaggttgtagtaagacagcagcttaacctacagtcttctgaagtctgactgggctcagcatcgaagattgctcactcatataacttgtggtgcagaaatgctggctataagctggaagctgactataact

SEQ ID NO: 162 - DNA, 501 bp, Bos sp.
tatcttacagttctggaggtcagaagtctaaaataggtcagcaggattgtattctttcagaggctctagacagtaatccatgtccttgccttttcaaacttcagaaaccatctgcactccttggctctgaccgcttctcctccgtcttcaaagcaacttcaaatctctttctctctctctttgactctgatcctagatattctgggaaaatcttcctatctcaaggttcttagtcacatacacaatatccsttttgccatgtgtggcaccagaataagaggttctgggcattaggacataaacatattcaggtgcttctggttcacttactgatgatggagaatatgatgaatgaataagcaggaaattctagagatacagttagaaagctatgggcaattgttcagggatacaataatcagtgactggtgtatcagacagaaaaacaagttatctatttgcaactgatgaaacagtgagttaaccaagactagtttggta

SEQ ID NO: 163 - DNA, 501 bp, Bos sp.
tgaagttacttatccaaagctatagaacacaaagtcttgcacacattaggtcttaaaatataaattacatgttagttgttatattagcaaaagaggcagacctaaaatatctggagcatttttttctcaccaaaatcactgttgtttaataggtttgttttttttgtttgtttgtttttccatttgtctggaagttcttcatttgtctggaagtgttcaaaagaaagtataaaagaaaaatgttcattatraaaatcaaccccaaaaagtctaggggcaggtcaagaaatgtattaaaaaaatatggaagagatctcagcatgttatcctgagggaaggacaaaatattcagttcaagtaccactactgcacagatctggtgggacccagctgttactagaaccatgaatgcttcattttgcacagagaggtatttacagggaagtaatttcctaagagcaagagctctggtcaactcggattgggttgaaggcatgctgt

SEQ ID NO: 164 - DNA, 501 bp, Bos sp.
acaaaatcaattacactttcaaaatgtattactcaatcaggagactatacaccaggagaatgcatctgacactcactgatgtttgatcctctctaagttaaaatcctggaaacaatattccaaaagagatctttgctatgagtaatatcatcattaacagtgaggtacatggagcttattttgaagctataaaagaggatgacaaaaagcatatatatatggaaacttggagccagagaaaatcagatggyttttaacaagctatagcagaagaaagaccacatttttgtccccttaaaccaagttttaatgaagaaaagattctgttatatatgatttccagtggtttaatatggtggattgagagactcattgtcatgcccttgagaaatgaaaataactgggtcttaattttttgctctaacattaattgccagacatcaagccactcaaggatgggctatctcatatagactatctgttttctaaaatttaaatctg

SEQ ID NO: 165 - DNA, 501 bp, Bos sp.
actccagggcatctccctaaaccagggatcgaacctgcatctcttgtgtcctatattggcaggtggattctttactacctgtagaaagactttattttgtagggcagttttatattcacactgaaattgagaggaaagtacagagagtttccatgtactccttctcccccaaatatacacattctcccctactgtcaacatcctgtaccacagtgaaacatttttataattggtgagactacattatcagwtcagttcagttcagttcagttgctcagtcatgtccgactctttgcgaccctatgaatcacaggacaccaggcctccctgtccatcaccaactcccagagttcactcaaacccatgtccatcgagtcggtgatgccatccagccatctcatccgctgtcatccccttctcctcctgccccccctgccaatccctcccagcatcaaggtcttttccaatgagtcaactcttcgcacaaggtggctgaagtat

SEQ ID NO: 166 - DNA, 501 bp, Bos sp.
taattattttttctcttgttactctattagaacagttttttattaagattattttagtttcattgtttatttttactaataacagtgcctgattcagtcctcataaaagttgcaatgtgacctcaacatagtggattttttttgtgtgtggagtatttgttaaattttttttacaatattaaaaagcaaagataataggtagtaaaatgatttttgtatatttttcttagcttcttgccagtgtccatcastaaaacatggtatcccttgtgccacttaccctaaaggtttctaagcctctattccttctggaaagtggacatgactctttatgctgctactgcccttaccagagtaaatttcacttaattccaatgtttttgaatttttactttctaggttaaagactgaaatgggtatatctgattagcaaaatctataagtgtaaggcaagttgggagagcaagaatctgtaatttccagctttatttttggaaggtg

SEQ ID NO: 167 - DNA, 501 bp, Bos sp.
cagaggtgtaagctttaagggtcctgttttccataggcttttgtaatgctgagacagagcctagttccatttgcctcttgaaagcattttaaaggttaagagaaacatttagtactatggcatttttctctattccaatggctcttaaaggttttgatatatataaggatcacttggggaagttgtcaaaaatacatattctctaggcctcagtctcagacactacagtgtgcagagtctaagcaaattcwagaatcttcattttaacaagtctggcacataaagttcctctgacagagagagcagcccctcccactccactaaacccaatttctgaaaggtttccagtgaggtcttagaggtaaaaaccagtgccctcctctaatgatctcctagaccttttgttagcacccatcagtgggtaaccccaccttcatctatgcagtgtggctgctgtgcagaagtctctcaaaggggcatcaagctttacactctctcctg

SEQ ID NO: 168 - DNA, 501 bp, Bos sp.
aatatctacctccaggctttaaaaaaggaagaggagagaccatgcctagaaataaaactaaatagcacagagtttccgccagctctgtccctccttgtcttcgtgaccttggccaaatcacatcctttccttttgcattagaaggactgattaatccctgtcccgtgttctttcgtggcatttgtgaagattaaatgtgataaatggttggaaaagtgcttgaagactgtaaattgatgtacaaatggaarggattaagggattagcttcaatccggtaaagattttctcttttatagaacaacctgctaaacatcagtccctacgagttgccagcacacacacatacataccacaagtgtgtgccctaatgttccttcttgtctccccacgtggttttttcatccttcctcctgcaacactcttgctcaacataaagatctttatgcatcctgactttagggaaactgtattatgttagacttctcatgcctgagggcaa

SEQ ID NO: 169 - DNA, 501 bp, Bos sp.
agacgcaggtttgatccctgtatctacaagatatcctcaagaagaaaatggcaacccactccagtattcttgcctggggaattccacggacagagaaacctggtgggctacagtccatggggttgcaaaaaaagtcagatacagcctagcgactaacaacaaaacaacaatttccaaagctcaaagataaatagaatcatttgaaatagcatccatatatacaagtggttttatcctgacctttctgactrgtagaaatattcagtttaattttgctacagtgaagttgggttccttcattattctgcatttcagtttgttttcctgtttcataacaagggctttttttaggatttttaaggaatgttgccttgaatttatatctctcaaaagtaacaaagttttatctgagaaaatatcacttgtacgttttaatgaaagcaggagccatttggggaaaagctagagacttggatatacgtgttttggtacccagactgg

SEQ ID NO: 170 - DNA, 501 bp, Bos sp.
aaaactgtcttccacgaaacagatccctggtgctaaaaaggttgggccttacaggattgagaaaagagtgctatctcctaagaaattagcttgctggcaccaggagaaaattgctcttgtcagtcaagcaggcattcctgtgtcctctaagatgtctggttaagtgaacgcaggtgcaggatgcacactaaagagggatagtggttcaaacgagcagggagagaatttatgtttaaaatttttctagcccygccttcaaattagttttatttcatcgaggggcaagagtacttcagtggaccatgttccaagttagaaacatgtttcgtcaatgtggatttagattgtaacacgtgtgtgtgtgctgttagtgtgccagtgtgtccaagtgccctaatagttgtatctaggatcactcaggggagaaggcaatggcaccccactccagtactcttgcctggaaaatcccacggatggaggagcctggtgggctacagtcca

SEQ ID NO: 171 - DNA, 501 bp, Bos sp.
ttggatctccttgcagtccaaggcactctcaagagtcttctccaacaccacagttcaaaagcatcaattctccggtgctcagccttcttcacagtccaactctcacatccatacatgtttcactcttttttatggctaatagcactgcatagcaccacatcttctttacgccatctatctgtcgatggtcatttaggctccttccgtgtcttggctgttgtaaacagtgctgctctgaacttagaggtgcrtgtatcttgaatccccttttatcgtttctgtacacagccctgtggaggacttctcttcagctactggagttgtttagcccaaagtatgtgaaggcttacctccttgccttgggtcaagacaaccctgatggattaagcactgttataagcacttttatttgcataattttctttaatgctttcaactactaactaaagcaggtactatcattttaaggaaaaatttttttaattcagagaaataaagtaa

SEQ ID NO: 172 - DNA, 501 bp, Bos sp.
aaggcatatacatcaaactcaccacactggttgccttgggggatggagcagaaacatgggcccgagtttggggacaaagaagacttcgattccaccgtaatcttttagttgtgtttaaaaccatccaacaaataattacatcatcattgttaccttagtgtagtgggtacaaaattacctgtaaattattttctgcactattctgtatttttctttaattactggagataataggtaaaaggaatgagaayagagttgaactcagctgctagtttcactctgatattctgtttcatgggagccaaacaaatctcttaagaaattttgattcgtaaaacttagaactgagatatgcagtggagacctaactcacattcagggaagacaaaacataaagaacatcagtaattctggtcatggtgcctgccactcatggctttttaggtttctgatttggttttctccttatgtaatcaaatttgtaatcaaatcatacatgca

SEQ ID NO: 173 - DNA, 501 bp, Bos sp.
gagacttggaaatctggcacgagatcactcaggaaaaagcgtgtggagtgagaagagaagagcgtcttggacagaactcaaaggaactccaaaagcaaagggagaagcagggtttcgtgacagaggcgggaggaagaggcagagcaggaggaaaaccacaggaagaggcacaggagcctaggaacacaacggaggcagtgtctgggtcaaatgctgctgcgaggccaaacaaggtgaggactgagaaacgwctgttccatttaccaaaaattagtggcaactctaagaagaagaagcctcagggaggccgtgagtgaataaggccaggctgcaacggtttgagagcatgtgaaaagtgaaggacagatctgatgaaaaggaatttaaaaagttggaggtaatttccttctttactgttctctcttggctactgagagtctacattttccagttccaccagcaatgtagggggttccagtttctccatcttattgtctgtct

SEQ ID NO: 174 - DNA, 501 bp, Bos sp.
tttgcctagaaatgcagcccatagcattcatgggtttactaaacagatgatttcaagatccctggttagacacctcccacctaccttcatgcaaatttgaaaagtacatccatttctcaagaaaactttacttttcctctcagaaagttatcacagtatgggggctttgctgacacaagatattttgttatcatgtgttagaatgtatgataagtcaacaaatcactggggtgtgaacagcctccccaggrgttgtgaattttatttgggttcttcaattctaccttccattttgatactttacagttctgttttctgaatgacttttattaaatcactgagtttttcaattataccagtttctatgttttcccacttcaataaatttagttttaacacttattttgtacttaagaatcttgacactatttgtttatttcaacacctttaacatcttgctctattttttcccctattatttttatttcacagatatttgta

SEQ ID NO: 175 - DNA, 501 bp, Bos sp.
atgcatatttataacccaatgattcctcttcttggtatatgcacaataaaaatgtgtatatatttttaccaatagtctaagaatgttcacagcactgttatctttaaaagcctcaaactagaaacaacccaagtgctcatcaacagtacaatgaataaataaattatggtatatttacccaatggaattttatatagcaatgggaatgaaccaattacaactacatgcaacaatactgaaggatcttgcaktgatggtgaatgagaaaagtcagacacaaaagagtacaaattgatgattcagtccagttcagttgctcagtcatgtccgactctgcaacctcattgactgcggcactccaggcctccccgtccatagccaacccccagagtttacccaaacttatgtccattggatgattacaataatacagttgaacatgtaaaagtaatgtgtggcataataagtcaggatggtgattacatttggaaaggaggcagc

SEQ ID NO: 176 - DNA, 501 bp, Bos sp.
actttattaatagacacacagacacttgtgagtattgcagatcctgcttttctagatgtaggatggagttgaggttctgcattacctgcaagttcctagatgaaccatgcttctggtccatgggccactctttaagagtataaagagatggctcccaaacttggttgcgtattagagctgcttggagagcttttaaaaatcaggatgccaggccacacccctgaccagttagatcagaatctcaaagtgaygcctaggaatcagtatttttaaattttttatagctgataagggcttcctaggtgtcgctagtgatcaggaacccacctgccaagcaggagacataagagacactgttgccatctccaggggtcaggaagatcccctggaggaggttatggccacccatttcagtattcttgcctggagaatcccatgaacagaggagtctggtgggctacagtccgtgggggtcatacagagtcggacacgactgaagcg

SEQ ID NO: 177 - DNA, 501 bp, Bos sp.
agggagacaggcgctactgataacagcctcatcaccataatcactgtgactgagtgtctttcataagccaagtgtttggcgactgtacaataatgcaaacaggcattattatccccatttagcagctaaagaaactgagactcagagaggctaatgtgactttcctaaatctcctagctagagaggagacagcagtgtataaatttcatatatttaggttctgcctgtaaatgctgagttctctatttacyggctgtgtgaccttcgaggagctgcctaacctctctgaatctctgttccctcatctatgaaatatggctaaagttactacctgcctcacagatacacatcaaatagcctggcatatagtctaaatgctaggcatttattagatattggaattattcaagtaggaggacaggacttggtgtccaagtctgtacagcaaaagcctgcatgagtgctgtcattctgtggttgtttgagaccatagaaagcctc

SEQ ID NO: 178 - DNA, 501 bp, Bos sp.
agaccttgaatatgcaagtccttctaaaccttcccaaatgaaaacctttcaatgaccatgccaagaaaatgtgatttcttcagaaaccacctccactatgctcaaggagggttaaatggcagcacagttcagatagtaaagtacaagacatgtgcctggaggagacagattgtttgccaaaagaagtgcaggatttcattaacttacatcaactcctgtaaagagttctggggaacatgcatttaactagrttctaaggttgctagacaaacaagaatgtaatcgaaggcctaattacctaaaatattttgaaatgggtgctcaactggaaaataggatgtaatgtcatggtttgagcacttgggaagaggtattaatattcaactaggttagccaatcttgacagtaagctatagccagtaagactgaaatatcagacatgctatagacagaggtctaaatgctaaagaatgtgaggatgctaaaaaggatctattatat

SEQ ID NO: 179 - DNA, 501 bp, Bos sp.
ccctaactgaaagatgggagtattatcccacctcaagagattattgtcggaattgaatgagatatatgcaaagagtcaaagtgtctaacacataggaagtgctacttaaagattagctattatttcatcagagagctcagactcactgaaatcaaatagcttgcacaaatccacacagataataagacagaaactataatttgagccaatgtgagtcacagctggttccctttcctcttcaccaggatagygcatcccccaaatgctctgtatgttttgtgtcagacaccagagccattctggagaaggaaatggtaacccactccagtattcttgcctggagaatcccatggacagaggagcttggcaggctacaatccatggggtcgcaaagagtgggacatgactgagcaactaacacccttctccagagccattcagttgtagaacaggagagatgagactccagctggcctcagcctgccccttcctctgggagaa

SEQ ID NO: 180 - DNA, 501 bp, Bos sp.
ttgtgaaccttaaaactagaactctttgctcccctaaagttaggctcaacctcccatcctagtattaactcaacaataactatcacttccgaactcactatggctgctgttctgtttcagcatctagaaaagaagtaatgaaaggcttccaggtctgtcttcaccacctaccacctgattaaacctctctgactctctaacactcagtgggaataaagtgcctcctagttacattgctgtaaagataacaygggagtaccagtgatggacagggaagcctggcgtgctgcagtccatggggtcgcaaagagtgggacacaactgagcaactgaactatacttgttaaacaaaccaaaaaaaaaaaaaaaacactatttgtagtattatttctaattatatttgtgttttaaatggatcaagtattcaaagggttcaaaatacaaaagttatttaaaagatacaaaaagtctccctcccattcagttacaagtattgtatcg

SEQ ID NO: 181 - DNA, 501 bp, Bos sp.
agcttagaaagagcttagagaaacttagaaagaacttctggtgatgaaaagggtgggcaaagaatcctgacccttgctctatcatcagctctctgagagaccaagcttcatgctctctctgggcctcagtttattttcagtgaagtttgagtgtcaggttaaatgctctcaccttctttgggctcttatccttctgaatctatggattggacagaactgggtgttctctggttctacctcttaccagcttygtaactgttggtgggtcatctctcctcttggagcctcaagcttttcatctcagttgcctagcatatcaggttcacaggaaatatttgctgaatcaatgggaaaataggggaccatgctacctatcttggctgcctccctgcgtgatagcaaggatatagtaagataatcctacacagtgccaactcgaagagtgggttgctatgattcagctggatccaggactgggttaacttgtcttcccccagcccc

SEQ ID NO: 182 - DNA, 501 bp, Bos sp.
caactaaatagcaattatggttttctgagctataacttgagcacaactgttatcatcctgagtcttactgcagccatttgtaagtttcaagtgcacacaagaacatcatttatctcttttggcaggcaaatactttaccgccctgcagttaagattatagatacttcgttttagagctgttcatttctgttctttgcatcaaaatttcaaggatactaataataagctaacaaaatcgttgaaagaatttrgtatttaggttctattcttattttctggcttgtttgttgctaatttatcatccccttatccaaatgatggcatgttattaattgcttctttctgtgttgttgtgcaatgctaatgcattgtggaattcaataaatattaaatcagccaatcaatccttttggttaatttagtagaattcatacctattctttccagtaggtttttattaataaagaataattgatataacaaaatcacaaatttaaagtt

SEQ ID NO: 183 - DNA, 501 bp, Bos sp.
gtgtcgaactgagcaataagtgtagaggtgcattattctaattatgttgacaagtgaatttgtaatcaatgaattaattcaatttcagatagctagaatcaaaagtatggctttacataaaataaaaactcaagggaaaaatatgaactactaagagcactgagaataactaattggtattacactttcgacattattttcaatagcaatttgtgttatttaagcattttgttatttaagtatccatcagyattatctcaattatgttatttctacataatcatatctccaaatttatggtgaatcatgaaattaagttcaatgaaatttcttctgcaattaaaaatgtacttttttattgtttaccttttgttgttttgaggtttgtagataccttgaaataggccaaattgcataaaaaaaaaaaatgcagtgagtcttcttttagtccaaaggaaataccagcatgtaaaagtttattcaaaagtttactcatgtttc

SEQ ID NO: 184 - DNA, 501 bp, Bos sp.
tgatgtgatctctcagatacctcttagactatggggaccagacggccatcagattccttgagggccaaatggattgcgaagttctcactggcctttacagcagctacaggctctaaatgtcactcccctaaggctccatcctgggttcttattccctctagtcctcctgtagctgccctatggctccctatagtagaactgaatatggcttaaagtatgtatttatgtgattaatttcattaactatttgstaagggccaggcatgtgtcagaactccatctaacatctgtcttaccatttagtcagtgcttatcttttccaataagcccataagggcagaggccatatgtacactgcatgctgttttaactgtagtccctgatatagaacctggaatcacaggtgctcaataaatacagggtgaattaatctagaccaacccccttacttaagagttgagcgtactgagtttctgaacaattagacatgtaacccaagtc

SEQ ID NO: 185 - DNA, 101 bp, Bos sp.
gccctaatcacacagacaaggctggtgccagccttaggcttgacacggcastgttcaccctctggccagacgactgtggttcaagacacatgtaaattgct

SEQ ID NO: 186 - DNA, 501 bp, Bos sp.
ataaaaatttcttttatcgatcctcccattttctgaacttctaaatatttagagtgagtagtattctagttcccaatcaaatacacatttgggtaccataattgtgttttctttgtaaaggtatgttgattttttttttctttctttcaaaggaactctttaaaaatatgataattttcttctaggataatgatgtttttgaatgccacacagaaaacagcctctttctcaccgattgtatttctgtaaaygcacttcagaggagcctacttctcccttttccaccttaattcattcattagtggtggtttcctttggtcctctggatttcctttcatcagtgaaggagcaccatctggtagcagacaacagtaaaatcaagctacacagaacacacgcagggaggactcccttcaacctccctcctcccagccaacatctgcttccctctgctgtttgcagtgacattttaaagggaaaactgggaatcatggtagtaat

SEQ ID NO: 187 - DNA, 501 bp, Bos sp.
ccttcaatgcaggagacccctgatcgattcctgggttaggaagatcaactggagaagggataggcaacccacttcagtaatcttgagcttcccttgtggctcagctgataaagaatctgcctgcaatgcaggagacctgagtttgatccctgagttgggaagatcccctggagaaggaaaaggctacccactccagtattctggcctggagaattccatggcctgtatagtacatggggtcacaaagactyatacacgactgggtgacttgatctttaaccccaaatcattcaggcttctctggtggctcagtggtaaagaatccacctgcaatgcaggagccacaggagacacaggttcaatccctgggtcgggaagaccccctggaggagggcatggcaacccactccagtattcttgcctggagaattccatggacagaggagcctagtgggctacagtccaggtcacaaagagtcggaccggactgaagcagcttag

SEQ ID NO: 188 - DNA, 501 bp, Bos sp.
  polymorphism (251)..(251)
  misc_feature (493)..(501): Nucleotide uncertain
gctacgtgctcctgtattttgtcttttctgtttatcctcacttttgctatctggaaatcaaagttacaccctcagaggaggataaagagttggtttgaaagcttccatctgaaagaatacgtgaaaactatggcttagaaaaaccttcggattcttcaccactgagccactctaacatgtatgaaatgtccacagggtggaagctctgtggcagaacgtcaagaaagggtctcttgtgctctggaacatcrttaacaaacaggtcgtcaacccatgtgttctgaactatgcaagaaatgcagactgtttctttacctgggtacacggaagaaatttcactaggcatgaaaataggaagatacttacagtattcatcttaacaatgtgtgtataggtgagtaaaattttgactaagtcttagaagaaagaaagagaaaatattttctaagataagttcatggtagcaaaataaagtctaagctatgaaacattnnnnnnnnn

SEQ ID NO: 189 - DNA, 501 bp, Bos sp.
gtccatggagtcacaaagagttggacatgactgaagtgacttagcacatgcacccaatcaccaatgtgaaaaacgaaaagcactgggcaatgatctggggcaagaaaagacagaaggaagaacgtgggaacaggaggagtttaaggccacagccacgaagccatgtttttgttcttttgccacaaaagcaggcactgatcatagagtttaaggcttagaaagcagggaaagcacctgtcaataaggaccaygcaactgtattttttgccctgcataaaatagcaaaaataattaaacaagttcgaataatcagggctactttgacaaacataattattccaaagccattatgccattacgccatgtatcataacactttcttgttttcaaaagaaaataaaaatagagaaatccttatattggtttagctcaaaggtttatccagcctaacagtgcatgtgacaggctcaaaaggaacatcgtatggaagggccaagtttt

SEQ ID NO: 190 - DNA, 501 bp, Bos sp.
ggacacagggcatttcagaaaggaatgagtttattaagaacaaagagcagagttaatggggacactgagagcacagtgggccaacctcctgatggaccagggaaagccaacaatttttgcgaatagccaatgtttatatccttgagtggagaaggaaatggcaacccactccagtgttcttgcctggagaatcccagggatgggggagcctcgtgggctgccgtctctggggtcacacggagtcggacacractgaagtgatgcagcagcatatccttgagacaaagaaaattcctgctggaagactggcggtaggtgatcggttggggcactatagggtgtttactggagtcggcatctttgcttaaccaagagtcaggaagtttgttagtgatgatcaggaggcttttggcaatggctacaaaggggctcagtcagcttcagagatgaccttggttctgggctccacttccatggttttggtgcaaggccttgcacctg

SEQ ID NO: 191 - DNA, 501 bp, Bos sp.
aacaaaggcatgtgtagtcaaagctatggcttttccagtagtcatatatagatgtgtgagttggaccataaagaagactgagcacgggagaattgatgcttttgaactgtggtgttggagaagattttgaaagtcccttgggctgcaaggagatcaaaccagtcaatcctaatgaaatcaatcctgaatattcatttaatgaatatcagtgaaaatcagtgaatattcattggaagaactgatgctgaacwccaataccttggccacttgatgcaagaagctgacaccttagaaaagacccagatgctgggaaagatcgaatgcaggaggagaaggggaaaaaagaggatgagatggttggatcgcaccactgactcaatggacatgagtttgaacaagctccagataattgtgaaggacagagaagcctggcgtgctgcagtccatggggtcacaaagagtcagacacaaccgagtgactgaacaacaacaactctctat

SEQ ID NO: 192 - DNA, 501 bp, Bos sp.
caaagagctggacacgactgagcacacatttatttatttggaagtgctgggtcttagccactggatcaccagggaagtccctcagtactcaactttgaattgttttgcagtcccctatcagcagtgcctgctttgagacttcagaggcatctggtaaaccacgatcttctgacttgcagaaggtcttttcacatccttggaggccttggcaattgaatcctactcttcttcctagtgtaaacctttgttaytttactctgtagtccatattgttgattcacgtggaatgggagcctcgcagaatatgccttattttccttggattgtgtgttaattttgaagtctgtctgtgtgctaagttttggtgaacatatgcttcagaatggaaatgtcagtccagaagataaaagagagataaaagttgaagattgaaaggtggaagtcatatgctctccaactggataagaatcccaagggaaagaatgtaaaaagagaagactg

SEQ ID NO: 193 - DNA, 501 bp, Bos sp.
cagccataacttcctttttgccctttggctaggctgcctaaggaggaggacctcggccagttctgttctggaggtgacacacagatggatgctggcaggaagctgaggaccaacactcctcaaggctgagggctctgtgcacccctgaccaaacttctgatgcaaaatatttacactaatgtcacacatttataaaaaacaattgcaactaaagatatcttgcagcaacttttaaacaatgctctacaaakaacaaatggaactagaataattcaccaaatcatacactttattatttttgaacaaccgcgtctcccacttgacagtaagctccatacaggtgataaacatgactctcttgttcagtgttgtagctccagtaccaaaaggtgcttagcgagtgacaggggcttggcaaatgatgaccacagctgacacagaccagtggtcagctcttccaggcacatgctttcactttccatgctgtctctcaggtaatcc

SEQ ID NO: 194 - DNA, 501 bp, Bos sp.
tcattcacagcccatctgaataaacaccagacgtccaatctgtatacattttgcctatacaaagtctaaatcttagtaacaatactgagcttatgtaaaactgaacttttcattcttaactacatgtaaagtagacatggctttgtgttctctctttttgtgtcaaaaccaattattaggacatcctaagctgtctttcttagtggcaacttagcctttactttaaaaaaaaaaaaaaaggttcctgtaaraagaatgagagttataatatgcaaatatatcatattaatggtatattatatttatttgatgacatcttttccaattaaataggaagaattacatttgaacaaatctcataaattaaacaatgccttcctctgttttgttgaaatttttaataattttatttgattagtgggttactatttaaagaatcctcaaacactatagcttctgtctatacaattgatttgttcatttttttatgagatcaatata

SEQ ID NO: 195 - DNA, 501 bp, Bos sp.
cagagcatatgaggactccaggtagacagaatttggctcagaatgctcccagtggggcaggtatcttctctgtgtgtgctggaccatgtcttgtcttgcttggcaccctccccacctcataccttgctgtctccccctcctctgtggtcatgaacatgtgcccaccctgctctcagcatcttgatgcattaaccagaggcttcccctacctctcctgacttatcccccatccaaccacagacttttttcckgagaagagtcttcatttctgcttctaagaggataacatttacctccccattggtaaaattacaaatcagtgtatttgaaaaccactttgcaaagcactttccttttctctcaattcagtctgacaagtatttcgtcagcaccaacttggtgccaggcatctttataaggaatctgtgcaggaggtgaggcgctgagaatggtactgaagtgccccatggctcctgacaaattggggactgtgctcaaccc

SEQ ID NO: 196 - DNA, 101 bp, Bos sp.
gcatcctacatttatcctgtgttctgcctttgttttaattttgactcagcytacagcagaagggttctctgggtccccagtttccagttgacagtatatcc

SEQ ID NO: 197 - DNA, 501 bp, Bos sp.
tccctggaaaggtgtgtcgaattccaaaccagtgatacacaaacaaacctttgaatcatgaccctacagaagctggagaactgtctgttcttttgacttgtccttgagctctttgaggcatcccaactgccctcctagtgctactcttctgggattgtgggactctctgtttgccttatgatggttttctaaacttcagattccaacagggatttgaccagacaggaacaaagaggacctgagatctggtycctctgagttatattctcccagctcagttccatgattttgtctgaagtaaatgcccaaggtagcagataatcctgctctactaggaacctgccagtgatgtcttcagccaacattctcttcgtaggcctccagtggctatttgtatctgcataagaagactcctgaaagtcccttggacagcaaggagatcaaaccagtcagttttaagggagatcaaccctgtatattcactggaagaactgatgctga

SEQ ID NO: 198 - DNA, 501 bp, Bos sp.
cctgtatggagccttgtttctggctcctctgtggtgccagaacagagttcctgccagtcagccggtctggggcttaaagatttcttcatactgcagctctgcaagcctaaatgaagagcagattatagagtcttagacaaataaaaggaatactgagtggttataaaatcttccttttttgacttgaaaaacaaatatgcctgtattgtcaggctgtgtgtacattgatgcaggcttgcataatacagctsctaagctaaaataacaaagcaaaaacaaaaccccaattatttttttccatagagagaaaagactaattttcatttgtgtgattttgaaggacttagttaaatatggcactgccagtcaaagcacaaattgagagacagaataacacttccatttagaaaggtattttcagattccttgtactaaattttactctgtatgttcagcagtggctgcgtaattattgcttccatgtactgacatgccagagtt

SEQ ID NO: 199 - DNA, 501 bp, Bos sp.
gggctcagtggtaaggaacctgtctgccaactcaggagactggggtttgatccctggattggaagatccccaggagaagggaatggcaacccactccaatattcttgcccgggagatcctatggacagaggtgcctggcgggctacagtccatggaatggcaaagagtcggacatgactgagcacgcacacacatttttccatgcacttatcagccatttgtacatttagagaattgtctattcaggtctrttgcctgtgttttcagttggcttgtgtttttattattgagttgtaggcgtctcttctgtattttttttttttttggctgtgctgcgttgtctggtaggatcttagttcctttcctgaccaggaattgaacctgggccctgggccgtgaaagcacacagtcctaaacactggactgcagggaagtccctccttctgtatccagatacagatcccttctcaagtgtatgggttgcagaggtttgcttccgtt

SEQ ID NO: 200 - DNA, 501 bp, Bos sp.
tgactgcgcccagtagcacccatgagcatgctttctgcactctgttttgagccccctctttctttcaaccctatttcctcaccatttaaaaaagtcttgtaatgtgtatactttgagaaacctccttcagttctttctactgtaggcaggaaacacatatatatgaagccaactaagattactctgacctgagttctagaagttataaagtgaggaggcaaagaacctaaacccaaggactaaacctttcygagtccaaggagaagtctttgagagctaatggagaggagcctcctccatctcagaaccacctacaaaacagaaactgaaaatatactttccttcctccgaagatgccctcagcttgttcttcaatgtgttcaaagtcaagagcacctgaagagttagagagaacagaactttagatgcaggaagttatggaaatgtgctgcctgtgaacttcccccccaaagagccttgcctctgctcatggattaacct

SEQ ID NO: 201 - DNA, 501 bp, Bos sp.
caaatgtacatgaaataaatcatgttaaaagcaatgctaataaatattcaaaactcaatcgctttctaattattttagaacattctactattatcaaggttcttggggcaatttttgtctgctgggtctatatggtggtaagactataaaatggcgtgctgctctacatctcttgtcaaactggcattaatcaccatatcaacaccatgaaattggctagggtgggaatactcacatcatgaaacttggckgttctaaaatcagggcttaatttattgctttgttgactgtatacttggaggtcactatggccagtaggccaaattcaacctcaagtttactgaatcacagcttttttttttttttttttgacatactgtttatggatgcttttgtgctataatggccaaggtgattagctgcaatagataccatataaccccaaaagcctgaagtatttcctatctgacccttagagaaagtttgctgacctctggccta

SEQ ID NO: 202 - DNA, 501 bp, Bos sp.
aagatttgtgtcatggatgtccaacatactcattattttccagatttccttttagccttcttcctcttctctgacatccctggttgccaaaagatcttcagtttggtaaccatccaggcacatgccctaaattctgaaaatattctgatcactaatatatattaccccattccccatttaagtctcttaatgttattgcttaaaatgcagtgttttttaaagaagcccttaatgtaagactgtatgtaatrtaaagaccccttaatgcaggggaatgcaaagcacatggactttaaacaaaatttcaactctgatactttaatttatggctgagtaaattacttaataaatgatcagtctcagtattaggctcaccatgttcaatcatggttttaggtgcttggtgcacttcaatttatgtagttctcataacaaccctctgagaaggtcctaattatgacaagagaattgagacacagagaatgtaagttactttcccag

SEQ ID NO: 203 - DNA, 501 bp, Bos sp.
tccatttctagggctttttttttccccaatagtaacatatgaaggaatgggctgacctttaatttataatcctcgtgtcacggagtttagccgagcttaacctatgtcagttgtattatagttcaaaatcgtctgccttgcttaggaaaaggcaggctgtgctttcagtgtcaggttgaaaaaatatataaataaaaaaagaaacgtgggaaaatagaccttcattaaaaaaggcagaggaaggctccacrggaaagggagaactgtccagaaagaaggaaacctgtgaggtggaagaagtgctggaaaacgaacaggaagatgataaagaaaaatttttgcagcactttgtaactggagagcgaccccatggactgtagccgccaggctcctctgtccatgggattctccagacaagaatactggagtggattgcatgccctcctccagggaatcttcccaacccagggatcagtcctgggtctcctgccttgcaggcac

SEQ ID NO: 204 - DNA, 501 bp, Bos sp.
gtctttattcactagagatacttacctgtaattttattatttgtagtgtctttgctttttctattggagtaatggaaggagtttgaaagtgtttatcttctatattttttgaaaggtttgggaaggataggtgttgactgttctgtacttgtttggtggaattctctcatgaagcctttggttcctatacttatctttatttgtcgtttttgattactgattcaatttcattactagtgatcattctgttyagactttctatttctgcacaatttagtcttagaagattatctatttctaggaatttttactttattctaggttgtccagtttgttaactttattgatagtaatccaatatcatcctctatatttccatgatgttctttgcaattttttgttgttcatttctgattttattagttgagctctttttttttttttttttccttatgaggcttgccaaagtttcatcacttttatttttaccaatagtggaag

SEQ ID NO: 205 - DNA, 501 bp, Bos sp.
caatatattgtcgaaaaactgtttgtctttattcactagagatacttacctgtaattttattatttgtagtgtctttgctttttctattggagtaatggaaggagtttgaaagtgtttatcttctatattttttgaaaggtttgggaaggataggtgttgactgttctgtacttgtttggtggaattctctcatgaagcctttggttcctatacttatctttatttgtcgtttttgattactgattcaatytcattactagtgatcattctgtttagactttctatttctgcacaatttagtcttagaagattatctatttctaggaatttttactttattctaggttgtccagtttgttaactttattgatagtaatccaatatcatcctctatatttccatgatgttctttgcaattttttgttgttcatttctgattttattagttgagctctttttttttttttttttccttatgaggcttgccaaagtttcatcac

SEQ ID NO: 206 - DNA, 101 bp, Bos sp.
acactggggctccttttgccttttttagcagaacgtccgtccatccatccrcatctctgtcccgtgactcaggggcacccactcagctttgattctcctcc

SEQ ID NO: 207 - DNA, 501 bp, Bos sp.
tgcacaagcagaaaatgtggttcatgtcctgttgaattctaaatatgttgtctctgagattatctctcctatttcttgcctaatttatccatcacaatccccaacatgtttcttggtggcacttggtaccttgttctatatttataaagggatcctttaatttttgttgttgttgttcagtctctcagtcatatctgactctttgtgacctcgtggacttcagcacgccaggcttctttgtccaccatctyccagggcttgctcaaactcatgtccattgagttggtaatgccattcaactatcttttactctgtcatccccttctcctgctgccttcaatctttcccagcaacagggcttttctaatgagtcagctcttcccatcaggtgaccaaagtactagaacttcaacttcagcaccagtccttccaatgaatatgcaggactgattttctttagattgactagtttgatatctttacagtccaagggactctcaa

SEQ ID NO: 208 - DNA, 101 bp, Bos sp.
ttagatgccctggacaaggacagctcgccaaaggatgacacttgggactcygtgtcggtcgtgacgtttccagagaatgagcaagaagggagtccccaaag

SEQ ID NO: 209 - DNA, 101 bp, Bos sp.
tattgctggacttctgttgtaacaagttggcaaacactggctggaactggkctgcaataaaacatgccagtatcaatgctgacaagagcctaacaagtgcc

SEQ ID NO: 210 - DNA, 101 bp, Bos sp.
agaatctatgagagagatgacttcagaggacagatgtcagagatcacagaygattgtccctctcttcaagaccgcttccacctcactgaggttcactccct

SEQ ID NO: 211 - DNA, 101 bp, Bos sp.
taacatctcactattctcctgtggtctgatagaaacagacacattctttcwagagcagagcagtatcctgtaatcctagaccttttcatgacacttggaaa

SEQ ID NO: 212 - DNA, 501 bp, Bos sp.; identical to SEQ ID NO: 90

SEQ ID NO: 213 - DNA, 501 bp, Bos sp.
gtccagatgccttggcaatccagaatgcagtcaagaattaagtaggaaaaaataatctgaaaaactcagtgattattcaaaagtctggttactagtatttatgtatttactaatacaagcccttgtttagctctcatgggtaaaacctttcttttgtaagtttttaaaaagttgatatttggtttctcaatccacagtacaatggaaaaagccttgaggggaggggctagggtggaggaagatctcagagrctacagaatctgttacagtattattactggttattagaaagtagattaaaacctacccaaagtaggcaatggaacaaaaacatagaaatcagaatctatttagcaggatatcctataccttagtcatcttcggggaaaataatcacagtatatcgcctgacaaaaacatagtaaccaaacaaattttaaataaatgtttgctatattaaaatagaacaaaaaggcttagcgtgtgatttttcatgttttt

SEQ ID NO: 214 - DNA, 501 bp, Bos sp.
ttgaacgcttacatggacaagagtgggaccctcatgttatcctcttgttagtctacatcacacagcaactctgtgaaggacattataactctattttaaagtgtttattaggaaggcaaaggtttaagaagtgaagtaattcatccaggatcacatagctacagttttggtggagtcaggattagtattacttaccttgacggggtgggggggacacattttatttattaaactaccttgcttctgctgtycgtttgctgagatgctggctgagtctagatccctcagtctaggctctggagtctatttccttctccctcagggtgcccacatgttttctttggtacatttcccagggcactactccaggtcctcctcatgaagcctggaccacacgaagcccactggagataccagagagggtctgcagaccgccgggtctgatgctcttagcagagagagctggtgcacaggcaggcaggaggctctgatggagagcgg

SEQ ID NO: 215 - DNA, 501 bp, Bos sp.
  polymorhism (251)..(251)
  misc_feature (384)..(433): Nucleotide uncertain from position 384 to 433
ttcacttccagccaccgacctctttattatgatctccttcacagaccagcatcctgaaagaattgtctgtacacctctgtcctaacttcttaattcccactccctcctcaatccatgcctaacaccagaaaccactaaatagggaatttctcagggtttaaacccaggggccctcttctttaaacatgcagtactgttgaaaaacaagtaaatttaatcaaatgggagctgcctttctctgctccttcctyttcatgctcaccttcagctccatattctccttcccttcacaacaaagagagcgtgttctcctgtatgtttggtggtgaggggaggagaggtgaggacagggttgggggaggaagaggagtatggcaggagacnnnnnnnnnnnnnnnnnnnnnnnnnnnnnnnnnnnnnnnnnnnnnnnnnngagtatggcaggagacaagctccaggcaccagcctcagcctgtggcagctcctcacacagccagttaa

SEQ ID NO: 216 - DNA, 501 bp, Bos sp.
tgctgcgtatacggaaagatgactaaaatatttgggattgtgagatagttattttaggcaaaaggagtaggaaaaacaagtaagagaagaaagggagcttttagttttctcaaaaactaacaaagtcccaccttagtcagggagtatcaggttagagcagttctgaaaggatcacctggccctcaacccttgggaattctcagccctgtggtgtttgcttttgtctcccaatagaggtgtggtatgaaggrgtcacacaggaggtgagcaagacgttaaatgctccacttccccacagtaaagaaacacttcttcagtcaaaccaggtgagctgaataactggatatgcttctccatgaagctaatacatttttatcaaacacttcaacaattcttattccctgactgaagcatttttggctattaatgattacaggaggatgaaactagtcaaaacacccccaagaaagaaaatggcaaagagaattatagtttatgttt

SEQ ID NO: 217 - DNA, 501 bp, Bos sp.
tccatgagattttccaggcaagagtactggagtgggttgccatttccttctccaggagatcttcccgaccgagggattgaacccgggtctcaagtattgtaggcagccactttactgtctgaaccaccagggaagtatttttcagagttccagcctcagtatcacgaagctgagaacagaaggataaacaaagtctttataactgaaactttgagatgattataataatgagatgattatgaatgtacccrgtgctaacggctctcaatccatctcatgaagcccccaccatgctttttcccctgtctctttccctctctctgtctccagctaaagtacaatgaacgtttcctcccactttctgaaaaaccttcttggttttcatgctgaaaaactatatctcaagaagttccttccttagtcctcagcagactaagctgtttggtcaccttaccctagaaatcaatatttattttctattcagttcagtcaatcagttgt

SEQ ID NO: 218 - DNA, 501 bp, Bos sp.
ttttcattagctattttcaaaatgtttgggtgtaaaaataatgattctataatcccatcatcgtagtatattgatattgggtgcagttctgtccttttgtgagtcccaactcctcagtgctattttattgctaactggtacctccatcaaattggaatcaggaaaggaaagaagacatggaattcattttagctgacattgctattcatcagtgaagccattacaagtgaagaatgagatttgcaccttckggtttaaatcaggcttatggagcatagttttatccaatactggagctagaggggactctgaagatcacatggttaaattttcatttatcatatatggtaacagaagcccgaaggtgaattgaccttgacaaagttcccatggatcacagccagtgttctgcttttcactctgttgatcattccactgcaccttggattatgtttttatcatcattgtttccccctgagggtaattaaatttttctttcta

SEQ ID NO: 219 - DNA, 501 bp, Bos sp.
ttctcttttgaaatgtaagaattagagaatagggtctcaagccatccttgatgacttgaaaaaaaaaatctccattagaaacacgaaatcatacatactctatgatacgaatcatgtgaaaagtatgtgtatatgtggaaaaagattaggagaactaaaggaatgtaaacagctatttcctgtaggctgagacattataggtaaactttttgaaaccatgaaattgaaatctttccgaaagaaagaaatayaactacatatgcttgggtggatttctgtaaacacgccgtgctacagaattttaaaaagtaaactgggctgggattatgaaggagagagagtaagactgttctttcattctggctgaaggaaggcgtctgggctgagactgcactcgtgctggggaaaaactccttctgcttccttccctttccagcttaacctcatttcactataatctgcttttcttctctctcgatagaaaatctccaaattagctga

SEQ ID NO: 220 - DNA, 501 bp, Bos sp.
accccaagtaagacctggctagactgttcctgatttcctaaccctcaggaatagtaggtaataaatgtttactgtaacccactaagctttggactgatctattataccataacagatacctaaatacattgacttagctgaattttaagccaatatggtatactagtaaaaaaaaaaaaaaaaaaaggcctagaattaataggagacattggttcctgactgtgcttaacagacagtgtggtcatttcctkaaagattaaattcctaaattcttaagttgtgctctgagccaaggtttaatgcagtatattaaaaaaaaaaaattctgtgatcaaatatcaaatatgctggaagaattcagaattaaaataaattattttattaatgtcttttcatatccattgacaggatatcattaatagtggaatataccagattttccaaaagtattttataatgaaaacatctcaagctcaagctcctgggattagggttccacag

SEQ ID NO: 221 - DNA, 501 bp, Bos sp.
attacaccctgtctcacctttgttaccacagagcccacaggtggcaccttgcagcaaaacacaataacagcatcgacaacaaaattgactttaaattgcaaatttttccctttctacttcaggaataaccagttgaacaaattaaataaataaataaacttgttatacagtcactgttctctttgtggcttactatatttcttctagtagcatgagactaaaagtttaaaaacatgtcaaggacctatggraggtaaaatggatttctagataatacatttagtttgtaagacctgtgaggagacacaacaggaaaaaagatctttttttctgtctttcacctgtttcgttctatgagagagaatactaagcccctttattttttggtctgaaaacagtgacaatggggattcatgaaaagataatcccgaagagttggctagttcctctctccacgtcttttggttctgtgtttattccaaaccagatgaccagcttggt

SEQ ID NO: 222 - DNA, 501 bp, Bos sp.
acctgtctccaaattcctgcagatggcattatttcactttcattaatggctcaatagtatttcattgtatatatctaccacatctttatccgtttctctactgatgggcctttagtttgcttccatgtcttgcctatcataaatagtgttgcgatgaacgttggggtgcatacatcctttgatatatatcatgtttttctctagacatttgcccaactggggttgctggatcatgtgtttaacattgcaawaaatattttttaacacaaccacaagtaatggaacatttattttgcataaatatacaatatatatatatgatgagcttagtgatttccagaacaatggaaaattgttctgatttcatgattatgtctttattatttgagtaaactaaaatagtatatgcttatcatttattatttgcatacaattaatattgattgatatttaatatttgtcaaaatctggtgtatatttaatatttcatttactcttgca

SEQ ID NO: 223 - DNA, 501 bp, Bos sp.
ccaacccagggatcaaacccaggtctccggtattgcaggcagattccttaccagctgagccacaagggaagtcaaagaatactggagagggtggcctatcccttctccagcggatcttcccgacccagggtctcctgcattgcaggcagattctttaccaactgaggtaccagggaagccccgatgtaaaactaaccttaatattcatactttgttgtgtcataggaaaaataaaactctaatattacttyctatttgtatgtttattccaggatagtgctaaaattgtaacttgaagctttttaaatttattactataatttaataagatttttaaaaacctcaagaaaatcaagggttttctgatacattgtgcagttaattgattaaataatgatgatgcataaactctctaaaatcttgaacttttaattcacttgacctatacagatcacctatacatagaactatgctgtattggggaatatcaatacatagcac

SEQ ID NO: 224 - DNA, 501 bp, Bos sp.
ttaagtagctttttattccatcttttagacttttccattttgttttttccatgaacttctggcatctaaagaaaacaacagataagaaaccacacaaagttcaacttgtaaaaacaaggagtcctattaatgaggaacaggtttcaaaataagcaaaattcccttcattcctatttcccagatttcttcacttcttcctttaaacaagagatgctcttaaagggggaggtggggaaaggaaagataatgargaaacttcttttcaggtaacccagacacctccacgtgctgtcatctcgcctccccttcctgtcattgtccaatatgttcctggactgtttttgcctaccaccagttccctctgtatttcgggatcctggttttggccttcacttctccactgacatcacattattaaaaatcactgaagatttctgcgtcaagactgttatctttcagtcctcaatagactcaaaacttctctagagcccttgaccactg

SEQ ID NO: 225 - DNA, 501 bp, Bos sp.; identical to SEQ ID NO: 2

SEQ ID NO: 226 - DNA, 501 bp, Bos sp.; identical to SEQ ID NO: 60

SEQ ID NO: 227 - DNA, 501 bp, Bos sp.; identical to SEQ ID NO: 73

SEQ ID NO: 228 - DNA, 501 bp, Bos sp.
ccataactgaagtgctacgagaggagaggacagagaggtgtgagccagtgggccagaaagctcctgggaagatgcagcgcctgctctgggtcttgaaaggcctttgagcacctcctagacagaaattctgaggaggaggagactgtactgttgaaacactgaagaaagggccagtgccaaggcagggagcaatgaaagaacagggtgccctcgaggctgctgcccggggtgtatgagggcagtcagtagcsggtgagagggcagagtctagaccaagataatctcctttaccttgtaggtgaccgggagccacaggtacagcttaaatagatgggtgagcttaaaagagttaaaatggctggaagtgaatcacacttgaatcttttccatttttacttggaaacagaacatctctcccaccaggcaggctcatctaatgtttccatgccaaccgactgcagataggctaagccctaaggtggggggagtggtgcagggaaa

SEQ ID NO: 229 - DNA, 501 bp, Bos sp.
ttctttctttctaatgcactctacactattcaggtatctttttaaaaaattaaaatataagtacatgggaacttatcattaacctacgtaagatcttccacaattttcctctactatcagattttttaaaaagaaaaaaattccaaacaccctcatcctggtattcaaggcctcccaatattaattataacttacttccctctggcacgcttagctcacccacgccctccttgcagttcaccagggccccrggcacaggacattactcgccatgccctttcaactcagaggattctctctgactggatggccctcctctctctctcctctgcctgagaaactcgcattcagcgctcagagcacatcacgtgtgccatgttcactgaggagcgttctggactcctcagaatgagacgcactattcattcttggacaatcattaatggagcatccattctgatttttacagatacaaagatgaataagagaagggaccatcac

SEQ ID NO: 230 - DNA, 501 bp, Bos sp.
agtctgtcagtgttttccagtgtttccacatctatttgccatgaagtgataggactggatgccatgatcttagttttttgaatgttgagttttaagccagctttttcactctcctctttcaccttcatcaagagtcttttacaaatgtataattgccctaaaaaggaagggaatgtgacttttgagatctgaaaaatgagtagaatttattgggtggagagaggtaagtgatggagagtagaggctcatgkaagaggctttgcagcagaaagaaacgtggggaggatgaagagagtcagtatggttagagctcaaagagttagtaggtgatgaggcaggggatggaccatatagaacctagaggcatgttgataaggttaagaacactaggaaactatgtaagagtgttgcctgtgtgctcagttgctaagttgtgtccaactctttgcaactttgtggattgcagctggccaggctcctctgtccatgagatttcccagg

SEQ ID NO: 231 - DNA, 501 bp, Bos sp.
tgtccgtgagggagatccgggccaccttgggacgtcaaggcggccgtgggggctggaggggagacaggaatgggtagagggaagtgcttggggtcctgggcaaatcagcatccttgggatcctgggcaaatcatttaagcatctgtatctgaagcccttaaaatcctcttcggttcaggtctcaggttctgtgaccctcagggatgggtcagtgctgggataagctttgctatggaggggctgatacatayggacccggggtacctacagagcctgcccccttgtgggaccctgtagctcatgctggccaggcagacctcagatgaggcccagttctgaggccatgcccattaggaaatgcaggaacagtccctgggaatatggcctctgttcacaagacgttgtcctctcccctggagtttggcaggttgtattcaaaaaccacaccgtcagggagtaaactgcccagaccggcagcgggtcatgcgtgtcaaatgtcct

SEQ ID NO: 232 - DNA, 501 bp, Bos sp.
gaattaaaaaaaaaaaaaaaaagatatccccataaatgagaaataaacactggaattcaccaggttcttaaaactggaaaaggtctttctcagtgaaggcaaggagagcctgcatctgcttggacagacttaggaaggctggccagcctgcagcatggcagccagcacatgggagagcctgataccaccctatgccatttagtcatgtatttggttggtggataatatcacagtcctatggggctgcagtrtgcatgttaacagcccaaaagcactaggaaaaagaaaaaaaatagaagatactttcctttgaattctctcaaattactacttatggcacaactgaacactcaataaaactaatcaactcatgaagcaaagagattcaagttcagactcagtaaatgcatttgtgtctatgactagccagtgcctttacacatgccacataatcctcacgataaagaaagtataaggaaggtatgagcattcccatttgca

SEQ ID NO: 233 - DNA, 501 bp, Bos sp.
cacaatgccgtgcccaaggccccatgagcagcaaggggcaacgctgggatttgaactcagatattttgccttcttcaaggtattgcctagtgagcacctgccttggggccagttgtgtgtggggcttgacgtgaagggttcactttgtcactgaatgtgcgaaaccaccatatggcacagacattattttgatctgcatttttcgatgaagcaactgaggctcaaagaggctaagccacttgcacgtcatyacagatcaagtgactggcaaagcagggagactaatatcaccagcttccattccacagactgttatgcttcttctgtgtgatgaacaacttccaaaattcatttcctgctttagtctaactttgatcttcacaaaaccccacgatacagagtagactttattgccctaattttatagatgaggaaacggaagctcagagagataagtgacttgctcagagtcacatgtgagcaagtagcaaggttagggct

SEQ ID NO: 234 - DNA, 501 bp, Bos sp.
taaattttgtgaaggctgtaacatctgggtctccttaagaccactttggggaaggcaatgtctcatctcctttcacttcctctccaatttattgtagttgcatagctctatctctagtttctagccacctgatgtgaaagaactgactcattggaaaagaccctgatgctgggagagatttaagctgggaaaagaaggggatcataggggttgaggtggttggatgggattactgaagcgatggacatgartttgagtaggctctgggagttggtgatttacagggaagcctggtatgttgcaatccatggggttgcaaagagtggaacacgactgagtggctgaactgactgactgatctctagtttctagtttggttattccattttaatgctgaagagctcagtttttcttgtggagggttgttggaagccttaaacattaatcttcattctcccatttctgttcaaaagatcctatttgtctacatggtagataaat

SEQ ID NO: 235 - DNA, 501 bp, Bos sp.
gcacatgcatgagtcctaactcacggtcccatcgagaagctagcccacaggggacaccttacccgtggatctccccgactggcccatgggaaccagcagtgctccagtgcctcacacacacacgccatcctatggccggctccgtgcctgcactcctgagagcaagcagactgctagtgaacatgaaaaaaaaaatgccagcctgaatctgcaggccagagaaagaccacaaacatgagctttagcctcaytcctgggaaagcagaagggagttgtcagcatctagccttctgcattgcagaatcaagagaagacatacaagcacaatctcaaaaggatattttttgataagttgattctagagctctattagacaatacataaaaatgttaagaacatgtatatccttaacacaacaattccacaataagtacacacatactatcacacacttattcatcacaaatacattgtatatacatgtgcaaaaataatatatgt

SEQ ID NO: 236 - DNA, 501 bp, Bos sp.
tgatgtgaactttttcctggttatctcctgttgaagactatgacatacattaggctagtcatgggcaaggaagactacactgatttgacttgaacttcactgtcctccagatctggtccaggaatgggtaggcttgacctctcaaaggatttctatttcatccttccacaaggcttatgcacagaatgtctactggccttccccagcatgccatttctatatgctaagaatgtatacaccaggcctgtctyggtccaggctcaataggtccatgggttctgctcttatattgcatacaattcattctaaaacttggggaggatctaggagcacccagccccctacaccacatcagtgctttccgcctggcaagcagctcttcaggatgcatctctattctttctctccatccactcttctctctccttactgttaccgctgcccctgacccctgcccctgcttgtcgttattgtaatttttaggtatcctctgccctcccc

SEQ ID NO: 237 - DNA, 492 bp, Bos sp.
ggtgttcacttagtaattgtgatcataattctgcttcctgtttagactgcctttaaagagagagcatgttgatctgaagatgggtgtttctagttctcatggtaaattaaactggcaatctgcaaagtggtttataattttaatctcccatattagtcagtataatgaagcttcaccgaagcagataaattacatggcaaataataagattcagtttgaggccttgatccatggtgacatcytgcccctctgacttgccatttcattcaaacttataccccagagagaatttcccagaagttttgcatggccagagtcactgaacctagggaaccacatttacttttccttctgcccagggtgtaactgaataagtggaaggcaataaatgaagcatctaaagaaagggaaatgatgggaatattgttttgctggacatgatacagattgttgtatgaagtaagcaagactacttgcactttttctacaata

SEQ ID NO: 238 - DNA, 501 bp, Bos sp.
tgtgagtctgtttctgaccagttcatttgtacatttgtatcatgtattttagattgcagatataagtatatcatatggtatttgtctttgtctgacttaatgtgctaatcgctaggttcatccattttgctacagttggcagagtttcatcctttttatggatgaataatattccattgtgcctgcacacacgtgtatacacacacaccctcccacttctttattcatgtatcggcccatggacatttagkttgcttacatgtcttggctccatcttaaccatcttcaccttgttgggcaaccatcagcaccatccatttccagaagtcttttgatcttgttaaaatgcaaactgtgtccttttgaaacagtaatttcccattctccatctcccatccctagcaaccactgatctacctttttgtctttctgaacttcgctactcgagatatttcatataagtagaatcatacagtgttatctttttgtgactggctgatt

SEQ ID NO: 239 - DNA, 463 bp, Bos sp.
aaaaaaaaaagactaccaaaaatgatatcaacatccaaaaacaaagaagccacaacaagatgatagcaggggtggtttaccaacataatcaaatcccattccctctgggtgagtgacccacaaaagtgaatataattgtacctcagaggtttttccacaagagtgagcgttctgagccccacaccaggctccccagcctgggggtctggaaayagaaagaggagacccagtaaatctggctttgaaggctggtggagtatgaccacagaattccacaggactaggggaaatagaaactccactcttggagggcacacgcaggatcttgtgtgcaccaggtcacaggagaaaaagcattgacgtcataaagggaccgcgcaagacccacctgctagtattgaaaggtctgctgccgagggtgggttggggggcggtgctggctaacacaaaagaccctcaacag

SEQ ID NO: 240 - DNA, 501 bp, Bos sp.
gctgagcggctccctgcctcccaggaacttgtgaaggtctgatggggagacctgtgtgatcactgtcaacaggcagagctgtgctgcccacggctgcttgctgtccactgctcttagcactttcctcagaaataaataccttgccccaccgtcccaaataaatgcctgtgcccacactggtgacatggggaatttgtctaaataatttactgccctccaaaagctgagcagcttggttagtaaggagtctyccacctccacccatcactaaagatgctcaggtagtggttctcgaaagaagggcaggggttgccagaccagcagcatcagcatcacccaggactttgtgagtagagcaaattctgtaatcacacagcacccacacctgccgtaccagaaactgtggctgggacccagccatcctatggtccagtgagccttctaggcgattctggtaaatggtccagtttgagaaccacacaggtgacggtgaagccacag

SEQ ID NO: 241 - DNA, 501 bp, Bos sp.
agctcgatgcctaattgttcactttcatccagatgttccctgtcaggaaggcaccgtcaataatgcatgaatcttgaaggcggagacagatgcggttattattccctctgggcctttcctgccttggagaagacatatgattcgggaatgactacaatttaaaaaaatttaagttgataccaccagcttatgagtaaatgcgtagctccgactgtttcagagcaaacgtctttgcagaattccagtcatcrtcgcagtttcgtttggcctgtaaattttcacagtaaacgcttcagacaataacacacaagagcttctagaagagaacacagccttcctgtggggttggagcaggcagctttctctgggctgcatcagcctcaagaagcctatttttaatatttgcttttatttcttaatccttccagacaataaacatgaaagtcattataaccaagtgtggctggggtaataaattcttcagagtccaaaaatacatgg

SEQ ID NO: 242 - DNA, 501 bp, Bos sp.
tttagcattgagcacgggttacaagtaatctccaagtatatgcagtggctcctactacttgccttcgcatctgcctctgagggtgacgtagcacccacaaccacaaggacccgggagaatcctgtggccactgccctgatgtcgcaatgatgatcccgggactgtggggtagtagctgtgtctgagttccctggagctattatggaaagaaaatgacaagctctctaaacattcagttaagtcccagtggraaagccagagggattccatggagccctaaaataatcctttctttcgtgcagctataggtttttgaccttgctgaaaaccataccccaaattggttcttcccaggtggcacaagtgttagagaaccttcctgccaatgcaggagatataagaggctcatgtttgatccgtgggttgggaagatcccgtggaggaaggcatggcaacccactccagtattcttggctggagaatcccatggacagaggagcc

SEQ ID NO: 243 - DNA, 501 bp, Bos sp.
atggcaataattttcctcccctccaaaaccttagtcttgctttggtgcaatagttacattatagacaagctccacacaagagactgaaggaagtcctgggactgaccctctcttggtgattctcagtgagctgactaggaactgatcaaggtctggccactcttgaaatttcacatgcaaactttttcttcttctaacccactcctctagtcacctctctttctacctctgttcaagctgtccatttcaaygcttgggaagctgtggaagttaagtttcaaagcgtatcggctcacgcgcttactgtattgactcatctcatccacaaagtttcaaacatgtgggtatttaattaaagcttttgcctgatgatttcaacagataaaaactgggagaattctgagctgtattagcttcgtaagagcacattctgattagaaaaggtcatggactagaccacttcaagtccgcccacctaggaggtggtcgacatggaaggct

SEQ ID NO: 244 - DNA, 501 bp, Bos sp.
gactcagaggaagggacagactctggaggaatctgaggatcctgggatgttcctataggaaccccataaaccctatggccacagggctaaatatgaacctttggagtgatggtttgtttgacagtttcccctcatagcatattctaattcacattctagttggccaggttattgacaggatcacctagttggcttcacgatataatcctacaaaagtcatgaaatgacatatcagacaagcatttcagagygccccaaatccccttcctctcaccctccttctctccctccttttccctctccttccttcactttttctttccttccatataagtatgaaaagtgagggaacaggaagcctgtagtttcctctatttacctacatttgtctattgcgtcttcttggaagggccaaacagtgctttgtgttaccagactatttcactttcaccgtgaaactcagttttctaaacacatctaacttgtctttctcttgtcaaa

SEQ ID NO: 245 - DNA, 501 bp, Bos sp.
acaacactcaaaacttcatcagtgtcacccatggagtcttgtaagaactgcagtacaattttatatctagtggttaagacgtacataactaagataaacgtggtgctttaccttgaaaaagacctatactttgtaggagtggtgtcagaagagttgcagtttgttggtgaggtagtgggaagagaattctctgaaattggacagaaagttgaaaccatgtgtggatagatatggctcatcacacacctggkgaactgacatagctggtacatatttgagttgtatgcattttctgttttcctacacagcttagttcagccgggtgtagttttctagtttcacctaatgtttctcactaaaaaagttacacataggcaaatagaagattaatgttttgctcatactgtgttggaacaaatttgcatgtttttttttaagctgtagcataaattaaagtacaaacatacgcatctataaatttccctcttaagattgctttag

SEQ ID NO: 246 - DNA, 501 bp, Bos sp.
ctccaccaaggcccagggttcctcgaaacactgttggagaactgcagatacagactgtcctaagggttttagatagaggtagggaagcaggatcaaatcccaagaacacgctgaacgagagacaggagtgtccaatgaccacacagacactagccacggatgctagaagagagagcccagagcccccaagtcagggacagctgaggagggggtggggtctaagctgccccttgcagagagagtgagactcragaggagaagagtaagtacaggagaggccccaacgccagaacaaggagggcgtgaagcagggacctgtagctacgtgcagactgatgagacctaggggatcagtcactcaaggctgagaggaaagtggacatttaaagtgtctttagggacttccctggtggtccaatgattaagaatctgccatgcaatgcaggagatgcgggttcgatccccgctgggggaacaaggttcccacatgctgcgtgacaa

SEQ ID NO: 247 - DNA, 501 bp, Bos sp.
tggctgtcaccagcctggcaaacattctgcatatcaatcagacagttgtatttctcgcatgacatttgcagcctaatgtagacatttacttatgtgatccttatatgtaagcagaccgtttatatgtaaataattgtgttccttcctgctgcagatgctgcatgtagaactgttcagaccttttagatctcaataccacatgcaatgttcatttattcttgttattcttgcttaaatctgtcttcctcctyctttggcacggttcactcctgagcgtgtggtttatgtgattgtgcagtggtatgtgtgtctgttttccagcagttaattctatttctggaaactcaatccaaataattaacagtgtttgaatctaatttttcttgaggatttgtcatgttgatttcttgttttgtgtttaacaagatactatagttaattatcacaaaaatgtatccagatattgacttgatttacataatgttaatgtgttctgggcat

SEQ ID NO: 248 - DNA, 501 bp, Bos sp.
ttagtgtattgacagatgtctacagtcagcaccacactcagtgctacaacattttccttttcctgtagttctcgcaccaaccccccacccccgacacttgctgtctctgtagaatgcctgtttggggcatttcagatacagggagccatatataggctgctttcctgttgtccaagtggccatgttgtcacttctttggtctatatccttagaagtggaaatgtggagtcacgtggtagctttgtgtgttractgtttaaggaactgctgggctgttttccaaagtgactttacattccttccagccctttgtattaccttatttcttaattataaccaccctagctggtgtgaagtggtatgtaacattttagagatactcttcttaaacttagtttcccccatctgcagaatggggatggtaatatccactgtgtaacaacaaaaataatagtaagagctaatgccaaaggaagcatttttagctttagaattgttgag

SEQ ID NO: 249 - DNA, 501 bp, Bos sp.
tttgtgaccccatggactgctgatacctacttgtcaagatatcagctattacccaggtatagctctgtctgctttcttcagtgtgaaaagtgaaagtgttagtcacttctgactctttggaaccaatggagtgtagcccgccagtctcctctctccacggaatactctaggcaagaatactgaagggcagccgttgcctccttccagggatcaaacctgggtttcctgcattgcaggcagattctttaccrtctgaaacaccaacgaagtcttcaggggcttactaaaatgtcatggtctcagttaattttactctgatacctatctaatatactccccaacatttcatatccccaattctgctttatttatactttctcttaattttcattgggtgacaaactatattttatttatttatcttacatatttctgtctttatcagctaaaatataagcaccttgagggcaaggaacattttatttttagttcactactgcc

SEQ ID NO: 250 - DNA, 501 bp, Bos sp.
aggttttctaaaatagccaaagatgtttttactggaagagaaggagcatgggcaatccctggatccacttttgattaaaagaatgaaataatgagagttgagtttatggtaaagtaattaggaaacacagtatcagatgctttagaaaaaggagagtctggaggcagcgaaaccaccgaggacgtaaatgggaagagattagagtgttagggataagcgtctgaattagagagaggaagaggcgaatgaargagacccttcagaaaatggtggaaggataatgaggaagaaaaaagaaatgagcccaaaatgtctaccagattctgcccctaagagatcaatcaagaaaccgagaactaggaagtgcagccagcattcacataggaaaagcacaagttcaaggtgacaagatctctaggtggaaacatttagtttctatccaaccagagttcaggtcagaagacagaacaggaaataatcactttagagtaggaattaaca

SEQ ID NO: 251 - DNA, 501 bp, Bos sp.
gatgcacagagaaagcagaaacttaaatcatgagcttctttctcatgattactattcacaaaaacttctacatagtgaaaaatgttaagtaatgtattcctgactaggaaaggaaaacaacctgtattataaggaaacaaagaagctggggcatgtacagagatgatcatttggggcaataaatggatcctaagtttgtatgctgacttctctggtggcctggtggtaaagaacccacctaccaatgcagraaacgtgggtttaatctctgggttggggagattctctggaaaagggactggcaacacactccagtattcttgcttgggaaatcccatggacagaggagcctggtggtctagagtccatggggtcgaaataaagctggacacagcttagcgactaaacgacaacaaaggctgcatgcaattcttgaaggtattaaggacatatcagttttcatttcagaaatgctatctacactctcacagatctttaata

SEQ ID NO: 252 - DNA, 501 bp, Bos sp.
atggctgcagtccatggggtcacgaagagtcggacacgactgagcaacttcactttcacttttcactttcatgcattggagaaggaaatggcaacccactccagtgttcttgcctggagaatcccagggatggggaagccttgtgggctgccgtctatggggttgcacagagtcggacatgactgaagcgacttagcagcagcagcagcagcagctgggctggacacatgaaacatggatcctgtctttgraaagtgcctggtcatgagagtgaggaaaaagcaatcatgatgtaggagggcaaccagagatgaagctggataaacagtgcagaaacatgaagatgaggggctgcttaaaggaaccactcgggaatggatgctgtgtgacctcaggcaactcatctttcctctctgggccttgtgcgtgaaactagagattacactagattttctctaacctcgttctcagatctaaacttctgtgacatcctccttgaga

SEQ ID NO: 253 - DNA, 501 bp, Bos sp.
ttatatctaatattgactttaggaagttaacagtcaagtaggccacagttagagtttgtgtgaagcatgagagagagaaagatggagatggggtggacgcaggcacaaagcgggaccaggagaggaagaggcacagctgctcttaagcaccgtttgtgtagaaggcactgtggatgaataagattcagttcctaggtcactcattaagcaccagctgtgtgccatgcactggagatatggagaaaagcacycagttccttccctcaagagcttaagagtctagacaaagatctcaattcaggggtggagacctcattgcagtggggtgcctgccatgtgatgtagagagaagggaagccgggccagcctggggtcaggaaggagttagggaaggtactgtggggaagaggcacacttcacaatgaagaagggcagaaagtggtcattgtgaggagtgacattcagatgcatgccagagttcggagaaggtagaccttgcat

SEQ ID NO: 254 - DNA, 501 bp, Bos sp.
aggctgttatgaaaacagaaattcactgtgtgtccctgtgagtatttcccactattaagcactggcataaactattagtgaggatgccaattaggggagccattctagacccctgattaagctgcagtatttagagttgacccctttgtatcttctcttttaaaatttttcctttagaattaaccctctgccatcctgaaactctttatctactaagtgcaataagggccactctcttgtcttagaataarcatgctctcatccctcccatatgaaatatgagggatttattttgacctttggtaacctcctgaggcttcccaggtggctcagtgggtaaagaacctgtctgcaatgcaagagacactggagatgcgggttcaatccctaggttgggaagatcctctggaggaggaaatggcaacccactctaggattctttcctgggaaatcccatggacaaagaaacctggcggattacagtccatggggtcccaaaga

SEQ ID NO: 255 - DNA, 501 bp, Bos sp.
cacactgatccaatttgccatcatctttcttttgagcctagctgtagtttcctaataaatttccttcccatatatcaccaacacaccaatgagggtgattttcttttcttttccttaaattaaatctttcattcccccatctcattttcaaatcattcaactatttcctgctgttttttgatgaaaataaactcacttttctagaatagatagtagatcatttttctttctcctgattcaactcctgagaycatcaagctatcagatgggtcacagcacctcatccagaaattatcacatcactgtgcctcaaggaagcacagctgtcaaactcttgttctcctctacacataagagaccaagaacctggaaagtgtagccagctagaatcgaagctgtttcctctgtgggtataaattctccttgtttcctagtattatttccaagctttttccttcccatctcctttaaatgactggtttcctttcaagtacctataat

SEQ ID NO: 256 - DNA, 501 bp, Bos sp.
ttgatctacagtggtgggctggtgctggcttgcactggctcgggagaagtggttattacatttttaagaactctgaagcctggttgttaatctttggtggcttgaagttgaccatggtgggagtttttttttttttttttaactaccagagttggtaaaccctataaatgaacccctgaactccaacttgttgttaaatttatttaccagcacaccgttgcataccaactttcgtattattactcttgctygagctgaccctgatcaggttcacaaggtgactaggaaataagcagaagtgttcagttatgagtgagaaatgcttaaatttagtgctataaatactgagtatcagtacacattgtgtcctttcttttgagggcattattgatcacaaagagaggggtgggtgagcttactaatttaatggttatgtgaataatgtggtttaaaataaatgttttaggtttcatatttggccagtatcgttcgatatggaga

SEQ ID NO: 257 - DNA, 501 bp, Bos sp.
ataggtttgttttttttgtttgtttgtttttccatttgtctggaagttcttcatttgtctggaagtgttcaaaagaaagtataaaagaaaaatgttcattatgaaaatcaaccccaaaaagtctaggggcaggtcaagaaatgtattaaaaaaatatggaagagatctcagcatgttatcctgagggaaggacaaaatattcagttcaagtaccactactgcacagatctggtgggacccagctgttactrgaaccatgaatgcttcattttgcacagagaggtatttacagggaagtaatttcctaagagcaagagctctggtcaactcggattgggttgaaggcatgctgtatcttcagtgtagaggatctgttcaataaaacacagagtatagttgagcttcataatgtcacagaaatcataaggcacaggttgctctaggactcctcgatattctgattgcttaaaatgtgtgctgtgacgtaatattcttactata

SEQ ID NO: 258 - DNA, 501 bp, Bos sp.
ggcttagaattggatttagagaagataagaatcaaattaccagtatttatcttgtaaattccaaaagatctacttaagacactgtattaaaaaaaaaaaaaagggagtttaaaagaaaagtttattctatgaaaaagtaaattcctcatagtctgaacatcccagggccattttaatattaaagctgcggcttcccttggaggaacctaaaattgccttttctcttgtctcttgttttatctccagtggarctgaaatatgttgccaggctttggatggtggaaagctaatgtccggtttttcattaatttggagagtttggattgtctatgattttttgacttgtggtgagacagacctctaaacatatgtatcctaaaagatatacatgtaattttttaccttggcattttaagttattaagctgttgggagctgagagaacagacctcagaagtctcctgcatgtttgcatgacctgaaatgtcagcatgctagtttt

SEQ ID NO: 259 - DNA, 501 bp, Bos sp.
ttaacttttctctatgatccttagttcttgtctgcacaacataaataatagcaactattttgaaggatgtttaaaagattgaagggaatatacgtattggccaagatgattttaaaaaatcgagtgtttaatgtatggaaggaataggactttggatcctgaaaatcatcgtggaacatttatactaccagggacatgtaactccattacctgaaatgccaagtaagggagatgacatatagagggcaggragtttacactgaaaggagctgcagaatcctaaagtgaaagtgaaagtgaagtcgctcagtcgtgtctgactctatgtgaccccatggactaacctactaggctcctccgtccgtgggattttccaggcaagaatactggagtcggttgccatttccttctccagaggatcttcccgactcagggatcggacccaggtctcctgcattgtaggcagatgctttaccatctgagccaccaggaagtcaatag

SEQ ID NO: 260 - DNA, 501 bp, Bos sp.
ttcagtaaagaagcaaaatgagaaaagtttgaaaaatttacagtcatttcaccaggacatgtgaaaaatgtgacttgtgtgtatgtgtgtgcacacatatgtgctcagtcatgtctgactctgtatggactgtagccccaccaggatcctctgtccatgggattctccatgcaagaatactggagtggttgctatgccttcttccaggggatcttcccacccaaggatcaaatctgcatatcttgcatctyctggattggtaggtggattctttaccactgtggcacctgcaaagccccaaaaatgtagtaaggactatttaaaggattggctcagacgcaaattagtttcactgggagcagaaagatgagatcgtaagttggcaaccacaacaggagactttgagtgatgcatgaagaaggatttctcaacagatctctaatcattgcaatggcctgaaaactagaaagttgaattaaaaatttcctgacccaatacaga

SEQ ID NO: 261 - DNA, 501 bp, Bos sp.
aggatgagatggctggatggcatcactggctcgatggacatgagtctgagtgaactcctggagttggtgatggacagggaggcctggcgtgctgcgattcatggggtcacaaagagtcggacacgactgagcagctgaactgaactgaactgaactgagttagtgaagtgaggtttgcaggtgacaggaaaaaaatctatgattaaattagatattgctaataaatagaaatcttctcttcagatcaacaytgttcatccctttcctgcagtttgaacacctttccttgttgacttgattcagatgagtagctcctgacttcactgagatgatacctgtcaaaactgaaattaaagaaagaacaaggtgtgaaattaaataatgagtcaacatggaaaatgcagccaatgatgattgtggagtcatatttgattaacagatataattcaatttaaagtctccagataaacagcttaagcctaattaataggtgaatgttct

SEQ ID NO: 262 - DNA, 501 bp, Bos sp.
gagagagtttcctttgaactgtatttccaattgctccaatgaataataatttctagtcattttgctagttaatttagtatattgcttttctttttcttctaacaggaagatacaaatgactccaaagaataggaaactctaaatttggaaattggggagaaaaaagccatttggtctatgcatgagcagaatgccttggtactaatggggatgaaatgtgacccttactctctgttttttactctgttttmctctctgcctttgggtgatgcagaagacaccttctagcatgtttttatcttacacaaaggcagtaccatgggtgggctgcctggcattggttgttctaaattaggcaatactagcttataagtttgaaacagactgattgagaatccattagtcaaaagagtaaacactggaatcattttctgatcaaataagtcctggcaccgtattcttgaccaatacaaagtcattccactgagcctgtggctcact

SEQ ID NO: 263 - DNA, 501 bp, Bos sp.
ctgctccctcccttcctcaccacctgccactcctttatgtctacccgatcagccaccccaacacagactgtggggggctggcggtggtccagaggctgacagtgaccagaggcaggaggataccttcaggctgtactcagctctggagaggaagacaagctgagcatagtgccggaacaggagggacggaaggaagaaagaggacagatgaccaagcaagtgccgaagggaaaaggaaactcgggaagtcygtggtaagtttccactctcagcaaagtgagagcagacacgagggtaagtaaggcggggaagacttcaggacagctgctccaaggcccctgtgtgtgtggtgggggcggggggggaaggggtccgtagaggtgacctcaagacagaggagcacacccagccgcgctctgtgcagacgcaggggcgacctgccaagctcagcagagaaaagggctgatggactcaccccaagagctctaaggaggacgctga

SEQ ID NO: 264 - DNA, 501 bp, Bos sp.
tcatttatggaatagaatgtgtgactctttttgtgtttatgtgttaaagtaacttgtcaggcaaactaattgcaactatacctcaaaggtatttttcaaacccactccagaagaggcttatgaacacactaacttaagtatttcttaattgattcatacttttagggaaaaatagtttagataatcactactaggctgcattttaaaaaaatgtttgtgcatataccctaatgttgattatagcacttttwacaacagccgggacatggaagtaacctaaatgttcatggatggaggaatgggtaaagaagatgtggtacatttttacaatagaatatcactcagccataaaaaaagaacaaaataatgtcatttgcagcaacatggacagacctagagattgtcacactgagtgaagtaagtcagacagaaaaagacaaatatcatatgatatcacttatatgtggcgtcttaatgaacttacctccaaaacagaagtac

SEQ ID NO: 265 - DNA, 501 bp, Bos sp.
tactttacaaatcacaacatgttttcttattttttaataagaataattgtatcagacagaatggattcagttatgctgtcatgggaatcataaaaattccagtagtatggtaaaacaaagcttatttcttgcttcttcaaatttcaaagtgtccaaataaatttctcttccattttccttcatgtagtgtcttggtattttaagatgtattgatatatttgcacttatatcttaataagggcttcccagakgactcagtgggtaaagaatctgcctgcaattctggagacatgggtcaatcttgggccaggacgatcacgtggaggaggaaagggcaatcctctccagtatccttgcctggagaaccccatgaagagagggccctggccactacggctcatacagtagtagcaaagagtcggacgtgactgaagcaactgagcactcatgcacatatcataatatggagtttaaagatcattggggcagggaaaaacatca

SEQ ID NO: 266 - DNA, 501 bp, Bos sp.
gccttcattacttgcagtgtgtgccaggttttcaactgtaaagatacttttttttcttttaaggcttttagtgaatttgttacaatatagcttctattttatgttttggtgttttgactgcaaggcatgtgggatcttagctccccaaccagggattgaacccacaccccctggattagaaggtgaagtcttaaccactggacggccagggaagttcctaaagttactagtttccattcccatcttctgtkttttgaaagtgaatcactgggttcagctcactcaaatggatgggagatggggtggggaattaagctccacctcctgcaatcagatcagatcaatcgttcagtcctgtctgactctttgcgaccccatgaaccgcagcacgccaggcctccctgtccatcaccaactcccggagttcactcagactcatgtccatcgagtcagtgatgccatccagccatctcatcctctgtcgtccccttctcctcctgc

SEQ ID NO: 267 - DNA, 501 bp, Bos sp.
atagtatacaccaagtctagcgtgaggcactttatttacattgtcacaaattttcatgatcaaggttcaaagacacatgatgttgtcgctatgaagaatgaaactgagcctaaaggtggttaaggtacattcccaagatcctcactaataagaagcagacctggaatttaacttacgatcatttgattccaaagacggcaagtcagccacagacatttttttggagtggtgggtcaatgctgtttgttttytttttagggtgcagcatatatatatatatatatatatatatattttttttttaatacaaataaagtgacaattttattatttggaataaagttatgtgattgcaaacttcttctcccccagcaatatccaataagtccatcaatacattgtttaaataaccacattcaaatgcattaaaataatgtatttgaaatctgatgtcatacattttaacgtttttatgaagatgaacaaagaccatttgggagg

SEQ ID NO: 268 - DNA, 501 bp, Bos sp.
tatgctcaaattatattagataataaaatattcctataagttagctactgattaatatttccattatcaagatgaggaaacaaaggctcagagagaaaaaacaacatattcaaatcctcatacctataagtggtggagccaagttacaatccaaagtctgttgagctccaaattctctgttccttaccactgctgtgtcttaagctaggcataacacgataatcaggtaataattagatctaaggtcttcycttgtggctcagctggtaaagaatccacctgcaatggaggagggctgggttcaatccctgggttgggaacatcccctggagaagagaaaggctacccactccagtattctggcctggagaattccatggactgtatagtccattgggtcacaaagagtcagacatgactgggcaacttttattttctttttcataagatctaaaaccaaggccaccttacccaccttcttgcctattctaggcgagtgcc

SEQ ID NO: 269 - DNA, 501 bp, Bos sp.
ggatgcttatatgagtctatatttacatccgtatatatcaggaggtgagctattagataaacaatattcatgaaagacatgattaatataatatatccattggattaaaaaagagtccctgtcttatagaatgatgcttttccactaaaagccaaagaacagactgagtgctgcctaaaattatggcatgccctaatggaatgaggtaaagattccagaatgctgagagacctcaccgccaaatttgagawaattttgggttgaattgattcccattaactacaaattacttcttttcaggagcttgtgtgatttgcagcatatatatgtataatgaaatgagcacatcaaatcctatgcattagggacagaagaatggctctgacgattagtgctattaccgtatagtgtctgacctcggctctctgctggctcactgcactgctatgacaggcagacagcaatgtctggggcggggagagggagcacaaagccaggcca

SEQ ID NO: 270 - DNA, 501 bp, Bos sp.
ataggtagattaattatcataaagctttatttaacccactataaacagaatattaagggcttccctggtggttcagatggtaaagaatctgcctgcaatgcaggatacctgggtttgatccctgggttgggaagatcccctggagaaggaaatggctacccaccgcagtattcttgcctggagaattccatggacagaggagcttggtgggctgcagtccatgggtttgcaaagagtcagacacaactgasagactaacacacagaaacagaatattattgggacttccctggcggtccagtggttaggactccactacagtattgagggctcaggttcgatccgtagtcagggaactaaggtcatgcagcatccatgctgtgcagcatggtcaaaaaacaaaacaaaacaaaaaagaaccaaacaaaaatccagaacattatcagtgaaacaggcaagccacataaaaattgttaatgaaatattttacacgctgtggtt

SEQ ID NO: 271 - DNA, 501 bp, Bos sp.
attatgtttcttattcatttttatgtcacacttctatggaatgagctccttgagggcaggaatcatgtctgttagtaatgctagcacttaaattggtttcctattccataatattagctaataagtgtttgaacagaaacatagtcagtgtccctagaaacttcagttattgaggacagacatacatcaacagatactcattaagctataaattggttgcactggttgagtagattttgaatgctactggrccaagggagaaagatccttatcacatgagggagagaatggagacacaggagactgagaagtgatacctaagataaggcataataataaatcattaagctggtcaattgaaggaaggagaagacagcaaggacaaagaaagtgtaaagtgaaatatagaacagcaagcagtggaactgctaattcaatgtcaaatttgaagtaaggagtaactagaggaaaagctgaatggttttaaaagggacagattag

SEQ ID NO: 272 - DNA, 501 bp, Bos sp.
actactaaaaacattcagggccactggctcaggccagaagcacagtgagcgccagcagacacgagtgatgtgcagcagtacagggtctgcgctgccatcttgagcctgggtggggagttagggatttgaagggaaccttttaatctctgtccttgaaatgaatcctttttttgtcctacaggagttaagctaccttagaaatgaaagagtatggactttaaccaagccaagttctctcattaaaaagaggytgagaatggtagaagggggaaggactgaggtacggaaagcagacgctggctgagaggagtttccctgctctaagacagctgactcttaggtctgtgctctcttctcttctaaggccacgaaggaaaatcccacagaactgggtttgttttcctccaggaatcctgtcatcctgtgcttgaccaggccccttctctaccgagaggtcagcagggtgaggcaaaaggttggctctggttggcccccgtggca

SEQ ID NO: 273 - DNA, 501 bp, Bos sp.
tgtctttctctttctgacttacttcacttagaatgatcacctccaggttcatccatgttgctgcaaatagcattatttgcttcttttttatgaatgagtagtgttcccctggatatatgcaccacatcttctttatccattcatctgtcgctggacctttaggttgcttccatgtcctggctgtttagaatagtgctgctgtgaacacagaggcgcatgtatcttttcaaattatagttttgtctggataygtgcccaggagtggggttgctggatcatatggtaactctacttttaatctttttgtggaacttctatactattttccgtagcggctgcaccaatttacattcccaccaaccatgtaggaaggttccttttgctccacaccctctccagcatttattgttcatggacttttcttcatgagatggaaagcttaactgccattttggaattttgggagtgccatgaagagggcagctgcattccctagaaatc

SEQ ID NO: 274 - DNA, 501 bp, Bos sp.
tcaaataaaagatgtaaacatgtagtttgtttctagaaaataatgtcataaatggtttgaggttcaattttgaaatacataatgagatcctttactagtcttgggttttagagtttcattgatgaaattattagaaattaaatgagtcctctactatgcttcaaatgactcagaggaagggacagactctggaggaatctgaggatcctgggatgttcctataggaaccccataaaccctatggccacagsgctaaatatgaacctttggagtgatggtttgtttgacagtttcccctcatagcatattctaattcacattctagttggccaggttattgacaggatcacctagttggcttcacgatataatcctacaaaagtcatgaaatgacatatcagacaagcatttcagagtgccccaaatccccttcctctcaccctccttctctccctccttttccctctccttccttcactttttctttccttccatataagt

SEQ ID NO: 275 - DNA, 501 bp, Bos sp.
tatatgccacttactactaatctttctttggacatgttgtagattttaggtgctgcatgtataaaattgggactataataatacatagattataaagttactctgaagactaaacatgatgctgcatatatagtgtctgcccactagtcatgtctctattcatgctattaacttattattgtatcttacgtaagcaagggtaaggatcaggacccagattgactgaattcaaattccacctctcctacttmctggttgtgtcactttagttaagtcacttgacctatctaagcttcagatttctcatccctgaaatggaaataatagcagtaactattatgaaagaatgcagatagaattaaattatgtaatatgaagagtttgaaacaggatctggacccataattaataggagataaatttaagagataggttagcattacatcaaagaagtagttgcatttcatgcttcaggaaaataagctaacctctgtagggctt

SEQ ID NO: 276 - DNA, 501 bp, Bos sp.
atatgtttaagatatgactaaatgactgactccctcagggacctgagatacaatatcagttaacacccaaaacatcacaaaaaaggaactggcactccactggaatagacaagccataaaaaatagcaaaaagtacttgtttccaaaatgtctcagtgattgcctcaatgcttttttgccacagagaaaaagcatggtccagtaacaatgctgcttctttacctgtcttcttacaccttattcaacaaccytaaccatggctagttcagacacctaagaacagaagacaaattggcacaattagcttatcaggtactgtgcatctatgccaagccaatggatgcttgaagaaaagtacataatacttcccctacatgaattacagcctacaaaatgagcatcattagctgaaggggtttattgaacctgtataatttagctcataactcaaagggcaaggaatattattaagaattacaatcttatgctattatttgaatt

SEQ ID NO: 277 - DNA, 501 bp, Bos sp.
aattcacattctagttggccaggttattgacaggatcacctagttggcttcacgatataatcctacaaaagtcatgaaatgacatatcagacaagcatttcagagtgccccaaatccccttcctctcaccctccttctctccctccttttccctctccttccttcactttttctttccttccatataagtatgaaaagtgagggaacaggaagcctgtagtttcctctatttacctacatttgtctattgygtcttcttggaagggccaaacagtgctttgtgttaccagactatttcactttcaccgtgaaactcagttttctaaacacatctaacttgtctttctcttgtcaaacatggattcttgtctgtaagaatgaatgctctatacattctaggttcttatgttcataaaacacccatccaattttgtaacttttccagctttctggtacacgtgaacttctttgaaatttgctcattttatattggagtttttt

SEQ ID NO: 278 - DNA, 501 bp, Bos sp.
aaaaaataccttggtgaaagaacagggtcagttctttgctcagcgtcttcactagaggataaatccacaaggtcatctgtgtcctgtacacagggaagctcttgttccttactggattcatcttcattaatctcaggacttaaagacaggcctttatctattaatacaaaacacatattattataaaaatgatagcaaaaacatttcaaaaagcacaaaggaattcacatacaaccctataaagtaaggaytatgaaactggcccaaagtgcaatttcttgatagttgagctcttctccttcatatgtaatatctttaaccgtaagccacaaaagagcataatattatgatgcctataaatcacactatattacctatcagtattcacttaaaatcttggtgaagctgaaccacataaaatttaaattctacagaaagattgttctagtctgctactatcttttcctcctctcttacttggttatctgctttaagtaatct

SEQ ID NO: 279 - DNA, 501 bp, Bos sp.
ggtaatcatttggaatggctggaagatattctcactttctctctttctccatccatacacagacccacaggagaaagctggatttccattaatgcatggaggtgaaggtgaaaatctgagaaagatagaatataagaaagttttaccagtcagcaaacaggtagttcagaaagcacacaaaaattttgcgaagaggaccacagaaaaaaacttgtgaggggttgtatcaagagacaaaactcactgcagargaggtaaaaatgagagaataagataacaggaaaatatggaaacttggatggagaccaaggatatcaggctgtgaatttcacaagtgtccacaggtttgccaagagaattaattgttagagtcttcaaggtctgccacgggtgaagatggaagaaacaggaacactcaacagatagccatagcttcagtgattcaaacttggaggacttttagtttggggtgagcagggtgctttggcctttgtggaagga

SEQ ID NO: 280 - DNA, 501 bp, Bos sp.
acacactccagtattcttgctgagacagtaccatggacagagggccctgacaggctacagtccatggggtcacaaagaactggacatgaccaagccacagagcacccaatctaaaagatcttgtcatcagagtaaggaagttctaaaaacacaaatacacccccatggtgctataaaaaatataatctgcctcaaaaattaccatttactaaagggaaaaatccctccaaaggatttaccacattaagttrgctctcacctaggtttttagctggaacccacattatgtgaaagatctcacagtcaaaatttatctcaaagtggccctgatgaaaggtagtaattttaagtgacagatggaagcaaatataaatcaactctacaaggacccactttcaattcaagcatcagagaattctcaccaataaacttccaagaaagataattgcattataaaaatcataaaacaggtttatgaagaagatagcagcataagactca

SEQ ID NO: 281 - DNA, 501 bp, Bos sp.
tttctctttcattttgattacaaaaaataaatttatgaagttctccaaacatatagctcttgataatgatcatacacaaaactcatgattatagaataatgaattctaatttgtatgccccaaagtcactttcatcttaattactacaactaactaatatggccccaggaccaatatttgtagttcttccctatgaaaatgaaaatatctgaatccatcaaccacctatcaaccatgttattgtacccagmtttttcaaatgcggaaaacttcctttccccccatttgattcccatattccctacaggagattagaaatttatcaccatgcccagggactccaggcagcatttacaactgaaatgaggtgacaagatgaaaaaaaggatatggaatgagtatttctatcataaacagtgaatatttcagcctccttctcacacctgttcccagaaaactgtaaacacatacatgagccagactcattctctctttcagaaa

SEQ ID NO: 282 - DNA, 501 bp, Bos sp.
ttaatagttggtttgaataacatttttctttatagtaattataaatcctaattttccaaattaccttccctgaaacactgatgttatatagcttttaaaagacattttgtgggccaataaatttagctaacactgaattaaacaaagttaaacagatttctttactgcagggcctttctaagtgttcagtatgctactgtgcattgaggccttcaaaaagaaggatctgaggtgcagttttctcaaatctrttggaatactgatctcttttcttgatacacatctcaggaaacactaccagaagtaagttacttaatttttcgtgtcaattttctttcccctgtgtcaaatttaatggacttggtattggactcccagaaatcttaatgaggatcaacatggtcccttcaaagcctaaattctgttaacaaaatgaatttcaggactatggttattaactatggttataaagagaggtctcatgtgggtgcagcaatggcc

SEQ ID NO: 283 - DNA, 501 bp, Bos sp.
ccaaactttctatctaacgtgattagtataagaatactgggttacgtctcatttgtccagatgccttggcaatccagaatgcagtcaagaattaagtaggaaaaaataatctgaaaaactcagtgattattcaaaagtctggttactagtatttatgtatttactaatacaagcccttgtttagctctcatgggtaaaacctttcttttgtaagtttttaaaaagttgatatttggtttctcaatccacartacaatggaaaaagccttgaggggaggggctagggtggaggaagatctcagagactacagaatctgttacagtattattactggttattagaaagtagattaaaacctacccaaagtaggcaatggaacaaaaacatagaaatcagaatctatttagcaggatatcctataccttagtcatcttcggggaaaataatcacagtatatcgcctgacaaaaacatagtaaccaaacaaattttaaataaatg

SEQ ID NO: 284 - DNA, 501 bp, Bos sp.
tcactttcacttttcactttcatgcattggagaaggaaatggcaacccactccagtgttcttgcctggagaatcccagggacgggggagcctggtgggctgtcgtctatggggtcacacagagttggacacgactgaagtgatgcagcagtgcagcagatggtttattacaggatattgaacatagttctctgtactgtacagatggtttatccacgttgttcatccatcctatatataatagtttgcctmtgctaatctcaaaactcccaatctattccccttcctacccttttcctccttagcaaccacaagtctgttctctatgtctgtgagtctgtttctgtttcttggatgagttaatttttgttgtattttagatcccacatataagtgatattgtatgatatttgtctttctctttctgacttacttcacttagaatgatcacctccaggttcatccatgttgctgcaaatagcattatttgcttcttttttat

SEQ ID NO: 285 - DNA, 501 bp, Bos sp.
agtcctctactatgcttcaaatgactcagaggaagggacagactctggaggaatctgaggatcctgggatgttcctataggaaccccataaaccctatggccacagggctaaatatgaacctttggagtgatggtttgtttgacagtttcccctcatagcatattctaattcacattctagttggccaggttattgacaggatcacctagttggcttcacgatataatcctacaaaagtcatgaaatgacrtatcagacaagcatttcagagtgccccaaatccccttcctctcaccctccttctctccctccttttccctctccttccttcactttttctttccttccatataagtatgaaaagtgagggaacaggaagcctgtagtttcctctatttacctacatttgtctattgcgtcttcttggaagggccaaacagtgctttgtgttaccagactatttcactttcaccgtgaaactcagttttctaaacacatct

SEQ ID NO: 286 - DNA, 501 bp, Bos sp.
ctgttattaagaagtggaggaagagtttaattactgagggaagttttttgtaggatgatgaaacttgatcctggtagtgattatataattctatgtatttgtcaaactgcacacgaaaagagtgaattatactgtatgtaaatttgatagtaaatttttaaaacttaaattctgtggagaagttaagtttaagatataaatggtgctaggaaaattcactagctagttaggagaaaaactttaagaggctraccttgtactatctactgaaacagattctggaaggagtgaagaactaattattttgtcatagaaaataaaaagagatatttatcaagactttgttgtggggataactttttaaattagagaagatgaaggaaatgctgaatgaaagatttatggatttggttacatgaaaatgtagaaatctggatatcataaagcccccaaagtaaacaaactgggaaaacatattcaacaaatataacaaaacagtat

SEQ ID NO: 287 - DNA, 501 bp, Bos sp.
tgtagcctccaaaacccaaagaagtctgccaagtgcaacttctaaaacccaaagtctgccaagcgttacatttctttctcagtagtaggaatttgagatggaacaagttattctttgcttggcagagttagcctcaccatggctcaaatcactggacccttaataactgtgtcaatagagcagttccctgactcttttctgtttttctctaatatatctatttaaaaaaatactggatgcatttacatagrtgccattgataatagcatgtgataatatgtttttcaaaaatgatgaaccttattgaaggatgacaggtaactttacctaattgtacacatatgacatctaacacagcctccactggtgtttggtattcaacaaccgactttttttaagtggtttttaaaaattaacttattttttatttatttatttttgactgtgctgggtcttcattgctgtgtgcaggctttctctagctatggagagcaggggata

SEQ ID NO: 288 - DNA, 501 bp, Bos sp.
agagccccacaaatagttttcctaacattaaagtattttagctttcatctatttataaaagagctaataaaatgtgtcattttaaggtcaagttcagctaaatatcaaagtatcacttttaaaagaacaatgtattcatttatcatgtttaatattcatttttctatgattaaggcatatccttaatatcttttggtacatcatatcctttggtacaatatttcattattttaattctgtaatgggcttgrgagtgaattgttttgttcaggttaatgtggtctaacattggcttttatcaatgcgaaggatactatattatttctaggtcatataattaacctccagagatagttacatttcaagggacatttttcaaagaagtaaacaaaagatgtctagggaaaacagccatttttttttcaacattttgtgagctttcaccaactcaatttcttttaaacagagtaaattatacaccactcaaaagtatcattcttt

SEQ ID NO: 289 - DNA, 501 bp, Bos sp.
ttatagaccaaacattactctggcaaatggatgccaaactgcatattgctttaaattctaagattgtttttcctgtgcaaataatgcattactttctcaaatgcagaaatggttttgtatggggtgtataaaaacagaaatatacattatatttctcttgactctgatacagcagtgtgtacaaaaaactaaactggatgcttgtcagtcaaccaatcatcaacttaatagcttacatatcagggaagatsctgtgggaattttgttttaatagagtcagtgattatttgacttactttctatccaattacttgcatttactggttttagcttcagaaaataattcttgagagttcatatcacatactttcttaattttgtatatatccataagaatctctcactatgtatataatttttctgtttatcatccttctctagctatcctctttggatgaaatgaagttttatattaatatttcaccattgccctggagcatt

SEQ ID NO: 290 - DNA, 501 bp, Bos sp.
tggctgttgccacctcgcttggttgcttacagtttgactctagtcaagcttgtttaattaagacttgaaaaaacacctcctgtcctgctcagacttggaagaatagccaagtctgaagctttttcttgctgtcatggttgctcagctagttggttggagcaacaaggtttggagatcctctagtacatgatgattttcattgtaataggtctgattgtaagcagtagtcatagtattgacgatagttctgycctactgaatatctcattgtttccgccctcccctcctctccccatccctctttttctctccctcctcttttctgagaaacttgaagaaaggaaccccatgctgttgccatgtgtggcgtccaggaatctgaatcattttgaagagctagctagttctaacactatccttaggaattatcttgctgaatatagcatcttttgtgatgggtgaaataataaaagagggaatgtaacttgggaaaaaaaaaca

SEQ ID NO: 291 - DNA, 501 bp, Bos sp.
tgctttccttaatatggtcactgtttccagggagaaagcactcccttaggaaacctgctcttcagcacacatgttcatctgtattacatgtgaccccatctcagtttgatttctaaacaatttctaaagcagaatggaaaagaagaacccggaggtgctcttcagtaatctctggacttctttatccctttatccctacatcaatagttcttggtgatggtgtatattgtggaaatcaatcaaatgaaagrggaaagacagaaaacagactatttttactaccttcctaaaaaatctgctatgactacagagcaaattggagacacatgaattcctaagacctgctattccagttactgatttcccttctctaaccatgaagccatccaactgctataagagggcttttattttttaacaaacctcaaaaaatatggcacacgacctgactgcttaaagatgtatatttttaaaaactgcaggtcagcttctttcaactca

SEQ ID NO: 292 - DNA, 501 bp, Bos sp.
gacatatcagacaagcatttcagagtgccccaaatccccttcctctcaccctccttctctccctccttttccctctccttccttcactttttctttccttccatataagtatgaaaagtgagggaacaggaagcctgtagtttcctctatttacctacatttgtctattgcgtcttcttggaagggccaaacagtgctttgtgttaccagactatttcactttcaccgtgaaactcagttttctaaacacrtctaacttgtctttctcttgtcaaacatggattcttgtctgtaagaatgaatgctctatacattctaggttcttatgttcataaaacacccatccaattttgtaacttttccagctttctggtacacgtgaacttctttgaaatttgctcattttatattggagttttttgcttgctttagtagagaaaagaacgtagcttgaattgcagtgagaaagataactctctcattggcagtgagtcagtttgt

SEQ ID NO: 293 - DNA, 501 bp, Bos sp.
cctgcctgccccaggagggggcagctgactgggggtggggtcctctgatttgactagctatggctgcaggaggaaggggaaacccattctgatgaaggggactccgggtcggaaccaccaggctcccatcctgcctaaataacacgcttggaaacagaactttattccaacactggtgtttcttcttctgtagccttgacaggagtttccaattcatctgaattttgtccatttctagggctttttttttycccaatagtaacatatgaaggaatgggctgacctttaatttataatcctcgtgtcacggagtttagccgagcttaacctatgtcagttgtattatagttcaaaatcgtctgccttgcttaggaaaaggcaggctgtgctttcagtgtcaggttgaaaaaatatataaataaaaaaagaaacgtgggaaaatagaccttcattaaaaaaggcagaggaaggctccacaggaaagggagaactgtccagaaa

SEQ ID NO: 294 - DNA, 501 bp, Bos sp.
atgtgttctttccattttctcatgtagcccagtagcttgcagggtttttaattttgtttttattgtgttatgtcttagccacttcttcttcctttgcctaatttcttaatttaaaacaaataagttgtagctttattgaaatacagtttgaatatcaatcactcacttaaagtttgtaattcaatagttttagcatatttacagaattgtatgccattgccaaaatctgacttaacattttcaccatctcmaaaagaaatcttggaattttgctattactcccctgacccttaaccctcagttcagttcagtcgctcagtcgtttccgactctttgcaatcccatgaattgcagcacaccagcctccctgtccatcaccaactcccagagttcactcaaactcatgtccatcgagtcagtgatgccatccaaccatctcatcctctgtcgtccccttctcctcctgcccccaatccctcccagcatcagagtcttttccaa

SEQ ID NO: 295 - DNA, 501 bp, Bos sp.
aaattgtggtattatgataaaagtattttatatatttacttactacctgcttctatacattgtccatacatacaggatcatctatcaatgtgatatttaatgactgactttcttggaaatctggaagcttgtcagtacacagactcctaattctttcacctgtttaagaagcaaccagaaaataattttatagttcctctagtagacatctgtgtaaaatgctgaattgcccattcaattcagattttttwaaagtattttattcatcccagcaactagagagaataaatattttttctatacacatactacatttttagtaagttctaaagcatgacatggtctctaatcatttaaaagctatactgagaacctccctggtggtccagcggttaagaatccacctgccaatgcagggtgcacaggttcaatccctggtctgggaagagtccacctgccacagggaaactgaggctgtgagccacaactgctgagccggcg

SEQ ID NO: 296 - DNA, 501 bp, Bos sp.
tctgtttgtaatagcaaggaattagaaatagcttaataacccaaaatagggttgaacatataaattattccattgaactacaaaataaaatagtgtcttgctaataacaaaggtgttgtacaaaaaacaggtatcgtatactttgtagaccaataacttaattgtatctgttatgagccttctattctacaagaaggagtgagaaggtttgatatgcacacttgtgtgtagggagagatggatagtaaaaraagttagaaagaaggaatataagcggggaagttgactcaggcatgaagtgatttaattccatcttgtggcaagggagtatgtaaacatgaagctaagagtttgctagtgagtgagcaaagatcacagattctgtgatattcttggggttaaaaaaattagtatgttgccccaaatgacacagggtggcacaaagattattagcatctaaacacacatcttagcctacctttggccccttgatgattgatg

SEQ ID NO: 297 - DNA, 501 bp, Bos sp.
gcttagaaaaccttagctgaactctacatctcaaatacctgcccccttctcaaactgctgcctaagtaacctaaccactgagacaacggcctaaactatctcagtgtcagtccaccagtaagaccacgactacgcactttctaagactaaggcttacgaagaactgaatgctagcttgggaccacaagtatggagagcctcttcctcaaaggagaaaaaagctgtaaagactgtagtccaaaattactctmaaactcaggtcagatataaatgaaaccttaaagagacaatctaatgccacagttccgaaacctggggcatattaaaatagcaaatgacctttaaagccatgatgttcctacaaaaaataacttgaaaaaaaattgtgatacccagaccctatttccagggattgcctaaaattgctgcaggcattattttcttttaaataagctccaaaggtgccattcacacagtcagagttaagaaccactgaggcac

SEQ ID NO: 298 - DNA, 501 bp, Bos sp.
  polymorphism (251)..(251)
  misc_feature (389)..(501): Nucleotides uncertain from position 389 to 501
aacaccttctggttaagttgtaaatgggacatttggcctacccaccctagcactgctccattacagcccagaatccaagtgttgtaagcaagaaaaatgttagaggctgagctatgaaaatggcagctgtgatataattatgaatataacctgctggagacagaattgtgaagcctattcaccaattctagccctgctgctaagcacctgttatgctctctttgtacttgtaaaatgggtacataaaactygacttcgtgtatttcatagagttgttgctaagatacatgaaacagtgtcttctgggccatagggcattgtaaattcacgctcttagcccctgatagactccaaacaaatgttagatcaaatttgaagacagaaaaacnnnnnnnnnnnnnnnnnnnnnnnnnnnnnnnnnnnnnnnnnnnnnnnnnnnnnnnnnnnnnnnnnnnnnnnnnnnnnnnnnnnnnnnnnnnnnnnnnnnnnnnnnnnnnnnnn

SEQ ID NO: 299 - DNA, 501 bp, Bos sp.
gtggaggaagatctcagagactacagaatctgttacagtattattactggttattagaaagtagattaaaacctacccaaagtaggcaatggaacaaaaacatagaaatcagaatctatttagcaggatatcctataccttagtcatcttcggggaaaataatcacagtatatcgcctgacaaaaacatagtaaccaaacaaattttaaataaatgtttgctatattaaaatagaacaaaaaggcttagcrtgtgatttttcatgtttttctgtcccttgtattttctatacactggtagcgagagctgggggcttaggggactccagtataattttttggtaggagtatatgacaggaagtgatgtgaatgtcagattattctgttaggacatattggtggcttcaagtcccatcagttttttcatctattataaagtttctaattggcctttaacccagtgggttcacagccattgattgtcactgcctagatttatta

SEQ ID NO: 300 - DNA, 501 bp, Bos sp.
acctgggttcgatccctgggttgggaagatctcctggaggagggcatggcaacccactccagtattcttgcttggagaatcccatggacagaagagcctggcgggctacagtccgtggggtcgcagagtcggacacgactgaacaactaagcacagcacagcacacacagcatgatgattttatagtctattttaagaaataatttagaagcttaagaggcagttaaaataagagaaaaagatcaatagaraattctagatggaaagggagaggtagtggtaccagaaatcagagataagaattgttagaactgagcactcaatttggctctccaatcaaacaaaaagaaactatgagaagtgaaacaatcctcatgatctgagtattatcaatttataggaagactggtctctctagcagtgaatttaggagaaatttactacatgaaaatgtagagaatgaatagataaattgacaaatattaacgaaacattcggaaa

SEQ ID NO: 301 - DNA, 501 bp, Bos sp.
aaattcaaatgacctgtctccacgggggcccacagaatcagcactgtctttattttcttccagttttattgagatataattgatgtacagctattgtataagtctaaggtatacaggatacagtgatttgacttacacatatcatgacttgattatcactgagtttagtgaacaaacatcgtctcatatagacataaaatacaagaaaaaatatgcatatattttccttgtgatgagacctcttaggatayacacttaattaatttcgtatgtaacgtacagcagtgtcagttatatttatcatgttgtgcatcgcatccctagtacttacttatcttataactggaagtttgtgcctttcaaccactttcatttatccagaatctcttcagtaagaactaggcatctgattattttgagttctcaaaacaaaagtgttatatggtcagaattaagacactcaggagtcaggcactgaacacacccagctatccagagctc

SEQ ID NO: 302 - DNA, 501 bp, Bos sp.
tgcactagcgggctgattctttatcactgggccaccatggaagcctagcaaaggttaaaaaagcctttctccagcttctagacaaatttgaaaagggtaataaatctctaaagataattgggcccattcccaaataaacatactaaaacaatattcgcttttcaaaccaatatgcataagttccaaaacaatcttaaaactaattaactaaaaagacaggagttttcattacacaaaacaaaccaagagastgaaattcagatattctagcttatatagatcttttttttttgtacttttattttttttatttatttttaattgaaggataattgctttacttatatatatcttgatccaagttttattttcatattaaatatagactgatagcaaactgacattgaagactacatgttagaactgacctgcttgtcttcaattttatttcctatcttttctctacataaatctttgtagagctgaaccactcattaaata

SEQ ID NO: 303 - DNA, 501 bp, Bos sp.
ttcatcaaggtttcctgctcagtgagtcacaatagggaccagaggagaaaatggacagatgggaaatattcctgaccatttctggatttccttagagtctactttcctaaaatagagaattataaaaaaattgaaatgtttaaaaaataatattattttgtttgttaagcttcactgtcacaagacatgtttatatctagtacagagctctaacaatttggagataaaggacttatatttatgcacaatcyttattgtacagaaattgctttcagtagactgtgagctccttcaacacacagaccatggatgttcattatggtatccccagagggtgtctgatgacagattaagtgaatactgaatgagagaatagtgaatacagaaagaatttgggagatgtggatattaattacaataaatatctatttagtgtattatacagtttgtatttcattcgttcagagtacatgtcaacttgtgttagatatgcagagcaag

SEQ ID NO: 304 - DNA, 501 bp, Bos sp.
tcaagcaaaagtatatttttattgtgatcagattatttcttgcctaaatctaccactgttcttccacatgttcaacttcactagaattgagtttgttatcctaaaaatgtcagactaatgagtacttttaaattattacattaatgttcttaatgcaaattttagctttgaagtcattcattaacaaaagagaaggccagatctgtttaactaagcattaactatcttcctacttctgtaactatcactgycatttctacaaaagttttaaaggaaaccaattaaattaatatttccatgaaatacatgagtagatccctacctctgtcatagcttttttctccattataaaaagttccgtaagtattgcaatttcatgcatttctgtcactataccgatttgcaaacatctgtaaataaacagggcataatgttgccaatgctggattgctaacattagttccgaatacaatatttcaacaactgtgaatacggatcatt

SEQ ID NO: 305 - DNA, 501 bp, Bos sp.
ctgggaaggtcccacatcctgcactactagcctgagctttagagcccaggagctgtaactaccgaagcccacgagcccttgagcctgtgctcataatgagagaaggcaccacaatgagaagccgtaacactgcaactagagtagcccccacttgcagcaactagagcttagcctgagcagcaacaaggacccagtacaggcaaaaatacataaataaagttattctttcgaagtacctgtgagatactttmgcagattaaaataaaaaagaatgagcactaaaggcatattgttgggtagtagagagaaagacatcagaataaacatctaaaatcaatggaattagacacttaacagggaaaagatacacagtggaagtggggggtattaaccttttagcactatttgatttttttcaatacccatatattaatcaaaaatgaaaacatattaaaaataaagaaaataatttactctattattcagtctttattaaattag

SEQ ID NO: 306 - DNA, 501 bp, Bos sp.
agccctctgggctcctctgtccatggaatttttcagacaggaatactagagtgacttaccatttccttctccaggagatcattccagaccagggatcaaacacgtttcctgcattggcaggcggattctttaccactgagccaccagggaagccctatacgtgaagtagtatagttttaatgtagatgctgtcttagattcaatgaaataaaccattacagtggtattgtagcttagggaatgcttattakattgaaaagaacagttattgaaaactcagaatgactgggtaggtttaaaaggaattcccagacttaaatattcagaaaactctaaaacttagctcaatgtcttattttcttatgaaacttactaatcttttattttctctttgtgtaaatgatcttaccagaataatatcagccataattaatcttctatttcttcttccttttcgcttcttactaccctcttaccttccatccttctctccattcattt

SEQ ID NO: 307 - DNA, 501 bp, Bos sp.
tcacaggagaaaaagcattgacgtcataaagggaccgcgcaagacccacctgctagtattgaaaggtctgctgccgagggtgggttggggggcggtgctggctaacacaaaagaccctcaacagccaaagcaatactgagaaagaaaaagggagctggagtaatcaggcactctcatttcaaactacactacaaagctacagaaatccaaacactgtgatactggcataagaacagaaatacagatcaatraaataggatagaaagctcagaaataaacatacacatagaatccactaatctacaacaaaggaggcaagaatacacaatggacaatggatgatgtcttcaataagttatgatgggaaagctgggcaggtacatatagaagaataaaattagaatattctctagcatcacacacaaaaataaactcaaagacatgggatactataaaactcttagaggtaaacataggcagaacattcctacataaattgca

SEQ ID NO: 308 - DNA, 501 bp, Bos sp.
tgttggcaatacaattctgtagtgtttttctctttttggaaaaatgtgtacctgaccttcctttaactccgctgttgctagtcatttcacttcagccaacgttaatgaggcatacttactaaaattttagccctgagttatccatgaaattgctcttttttcatgttactcaggtttaaagtaggaaaatgtctactccagagttgtttgggtactgcttggctgataccttgcagtaatattaatatggytcagttcttcctaaaccaaaaaaggccaaacccgcagagaaatagtggcagtgtcacccctcctttcccatattgtgacagtcaaaaatgtctcccagcacgtcagatgtttccaggtcagggagagaagggatgcaaaatcaccctgattgagaacctctggtctagtttggtggctctctgacctgaatgtgcatcagagtcatgtggaaggtattgaaacagactcctgggccccccttccagagtt

SEQ ID NO: 309 - DNA, 501 bp, Bos sp.
tggatctgcttcaggtttggctttcttgcgggagctcctcatgagtggagctggtcctggtgcccagcgggtcgggaggcggttctgtcttggtggtgctcaggctggcagggtccggccgatgcctctgacccctgatcacctttaagagccgaatgtggtgggctgccacctgtgactgctgaacagaccagttacatcactcggagttgacaaatggaggctttcttgttctaactttacttctgagytaatgactgggattttttaaaaagaattttatctcatcaattttgaactgaatgtgggaagataaacacttgaccttcctctcttcaatttcaaggtgaagagcagccttctgcttctgaccaatgaggatgtgcttctgggacatcactgtgaacgcatgaattttgtatgttgatgagcctcagtcaattgcagttatttttctttctgatcgtcttattgttccatattgagtcagcgagaaccttt

SEQ ID NO: 310 - DNA, 501 bp, Bos sp.
aaattttaattaaaaatatataaatcacatagatattctgaatctaacctgttacgaacctagtagaaaacctcttcaggaacaaaatctagcttgctcacagtcactaaatccagtttgccacctctgattttagtaaatcaaagacttaacgtgcttctgttgtaacaaaccagcttttccttcaggtttgtgtataaccctcggcccttggctagcctatgaatgctattttttttttccacttggtraaacaaatctaattggaaaacttgttgatggaaaatactttataattagaggggttttgttgttgttgttgttttaaggaagggcaggttgcagccctcactgggaggccttcatgttttaatgacttctgctcacccagacacatgctgacttggggagaaatttttcaagagagtcagcagtccacctcggtgattgtgctgggttccttcccaccaacttcagaaacggccccattaccttttattg

SEQ ID NO: 311 - DNA, 501 bp, Bos sp.
agagttgttcaccccctccttctagggcattcagaatatgaaacagaaatgaaatggaaaccaagggaaagaaagaatgaatgaaagcccaaaacagcaacctctccacactgccctcccctgccgctccctagaccatccccaaggccatgctcctctggccttcaccatctgcgctttcccatagtcaggccaggtgaaaaatcaggcatctttttttttaacttaaaaaaatatgcatcattataaaytgctcatacttctgtgagtagtaggccaaagactgaatccacattccaaagactgtaatctaaccacagtgtctcagtcaccccaactgtcagacacagggagcttttccaaagccgggagacagagaagagagttgacccaggagaggctgcagcaatgtgccatgtgccgccccacccacacaacaggacttcttgctcactgcaatctctgttgccatcaccactcttcctcctcctctcactgcac

SEQ ID NO: 312 - DNA, 501 bp, Bos sp.
tgggaagtcatataatggaattatttattcgtgagataagctaccaatgatcatatgaaaactaaatatgaggtaagcagctcagggtcatacagctggttcatggaagaagtgtgctaaatgcctttcttcagcttcccaaggctgtgctttgaagagccccacaaatagttttcctaacattaaagtattttagctttcatctatttataaaagagctaataaaatgtgtcattttaaggtcaagttcwgctaaatatcaaagtatcacttttaaaagaacaatgtattcatttatcatgtttaatattcatttttctatgattaaggcatatccttaatatcttttggtacatcatatcctttggtacaatatttcattattttaattctgtaatgggcttgggagtgaattgttttgttcaggttaatgtggtctaacattggcttttatcaatgcgaaggatactatattatttctaggtcatataattaacctcc

SEQ ID NO: 313 - DNA, 501 bp, Bos sp.
cttgcttttttctgacaacaactttgtaaactcctttcagaggaggcttggcctcctctcaatagttctagcctggctagaactcaaatggctcaaatagttctaacctgacacctctctatctttgggcaaaatcagagggtactcatcttacagacacaagagccacaagggaatgtccttttttatttgtcaagaaaaaatttaaataatgcatatgtaaaggaaacttagatgtatattactatgtraaagaagcatctttaagagtctctctctatttgaatacaattatctttggaggcaacaggtattaaactttaaattattctttggaacagagtttaaaatacagattaagaacttgggcattggaatctagcaggctaggggtgagcactggtcctggaacctaccagctatatgagcttcagtatactatttaatatcttcaggtgtcagttgctatcactaaaaaatggggatcataataatgtaatt

SEQ ID NO: 314 - DNA, 501 bp, Bos sp.
tgttctttcagaaattgctatcttcacatcttgcttaaagcctgaaaagtgaaaagtgctcggcatcaagcattcaataaataaatctgggatctcacaatcaaagaatgcacatttaatctatatgaaaccatcacagaacaattaaatactaacgtctatgctactaacacttgctgcagaaaagagagaggatagtatggactgaagttagagaaagtcttcataagggaatttgttattaaagaagyaggagaatgagaataatggtcaagcagaaagcttaggaaagaggtagaggaaacaaagggaaaagtctatggagatataaatatacaaataaatgtgcatttgaagcaaagaacagatgtactgcatattataggagaagactggtaaagaaggggtgtgtgtgtgtgttgtcataaaagtagggacagattatagtggacttccaaaggcaaagggatttaaaattgatggacaagaaagtcagttttg

SEQ ID NO: 315 - DNA, 501 bp, Bos sp.
actagtttcattatactaacgtgtgatttaatgcctcaagcaattaaccaaaataacattttttaagatggtaactattaatagttatcagttcttccttttttacaatgttccaaaagccagtttatgttagaaaataatgaagtccaaataagtatagcttacaacagtaagactaaatttttaatgtagagattatacaaacatttgattgtatgagaagccaccttgggaattgataacattttttwaaatgatgtatctattgcataaaaccagattggattgataatgccccttttggcagaatcacagaatcctgattgagtaataaaatgatggtcttgtatgtctatgaaattgagagttacatgcttacaaactagcttttagggcatttccaaatagggagtttgacttttaacagaactttgtgcatagttgctcagttgtgtccgactctttgcgaccccatgtactgtagcccaccaggctcccagg

SEQ ID NO: 316 - DNA, 501 bp, Bos sp.; identical to SEQ ID NO: 151

SEQ ID NO: 317 - DNA, 501 bp, Bos sp.
agtaaaaaaaaaaaaaaaaaaaggcctagaattaataggagacattggttcctgactgtgcttaacagacagtgtggtcatttcctgaaagattaaattcctaaattcttaagttgtgctctgagccaaggtttaatgcagtatattaaaaaaaaaaaattctgtgatcaaatatcaaatatgctggaagaattcagaattaaaataaattattttattaatgtcttttcatatccattgacaggatatcwttaatagtggaatataccagattttccaaaagtattttataatgaaaacatctcaagctcaagctcctgggattagggttccacagcatactccaagaaacccttaactttctgagtccttagggtctcttttcactgggttacaaacaatgctgtaagctaagaaaatgcgctttcaacagctaggcaaatctgaaaaggttgttatttgtttctaagcctcagtctcctcagttataaaaagggaatg

SEQ ID NO: 318 - DNA, 501 bp, Bos sp.
cgtgtccaactctttgtgaccccaagaactatagcctaccaggcttctcagtccatagaattttccaggcaagaatactggagtggattgccatttccttctccaggggatcttcccgatccagggatcaaacccaggtctcccgcattgcagacagactctgagccaccagagactcaaaatagacaatagtctatgattaatattttagaataagatgattggaagagatcttataggttatttgatcygctaactcaagttaactttaaatgtcctctgtagtttcaaaatggttatttaatctgaacttgaacatagtagagtaacagtgaactcagtactgtaacatgagctactccacattttcattaatttctcagtgtgtgtgtggcagctggagaaggggaatgtggaaaccagtattaacattcacgtttaaactctatggatatgtccatgaaaacaaccccaaccacgtattgcagaggcttagaaaag

SEQ ID NO: 319 - DNA, 501 bp, Bos sp.
gaaacaagatactaaatctgagtcagatacagtcatctactgaagagggaaaaaaattgtggtattatgataaaagtattttatatatttacttactacctgcttctatacattgtccatacatacaggatcatctatcaatgtgatatttaatgactgactttcttggaaatctggaagcttgtcagtacacagactcctaattctttcacctgtttaagaagcaaccagaaaataattttatagttccyctagtagacatctgtgtaaaatgctgaattgcccattcaattcagatttttttaaagtattttattcatcccagcaactagagagaataaatattttttctatacacatactacatttttagtaagttctaaagcatgacatggtctctaatcatttaaaagctatactgagaacctccctggtggtccagcggttaagaatccacctgccaatgcagggtgcacaggttcaatccctggtctgggaaga

SEQ ID NO: 320 - DNA, 361 bp, Bos sp.
ttttttttattttccaaaagtcaaaaattaaattcatgacttttagggaaaaccatcctcagcataagtttatatctttcttcctaacagagttaaataaagcataaacayactaacgtcattttagtttaataattaatctatctctttcatttctgattgctgtactgagttttaatagacttttacatacctggcttttatgtaaatgatgaattaaagttacatccatttaactgtaattcggattgaaaacgctgtattaagtgataggaatgaaattagcctaatatgtaaattgcctccataagcctaacatccagtcaagatgtattttatggggataaaaaatgagtgaggt

SEQ ID NO: 321 - DNA, 501 bp, Bos sp.
atatattaagtagataaaggaatcatgtgtttaaaaagacataaggatttacagatgaaaactacaatgtctgggatgggaaataaaatgatgggaaatagcagattagacattgcagaagaaaatattagggatcttgaatacctagtaagaaaaatgaccaaaaatgaaacaaagacagaaacaagatcttctcatcaggaaagtaaaaagaagacagtttcagctaactgtagcaaatctttaagttkaaaaatatacaagtaactctatcctttgagaaaatatagagatgagggggaaaacctttaatcataagacataggaatggtactatatcaagagacatcaaaatcaaatttctcaaaaatagtgatagatgatcataaaggtagccagaggaaaatggcacattatatacagaagatcagatataaagatgagagtaagtttctggttagaaacagcagaaatgttatgaaaatggaacatctttaaaat

SEQ ID NO: 322 - DNA, 501 bp, Bos sp.
ataataggttaaatagtgggtgtggcccaattcctggaaatcccccaaataattgaaataatccacccacttaaattatcctatgaaattacctaacccaggaaaactatccatgccatattccagagcctctcactttctgagatggcccctgctctgtctgtggagcctatttctctctaaataaagcaagttcttacctattacttcatctccaaattctctcatgacaaggaaagaaccttaaattmtctggaaacaatttctattattttaaatttgggtgttttttgtgatccagcatatggtctatattggggctttccagggtggtgctagtggtaaagaacctgtctgccaatgcaggagatgtgggtactatccctggctaaggaagatcccctggagaggggcatgacagcccactccagtatttttgactggaaaatcccgtggacagaggaacttggtgagctacagtccataggatcataaagagtc

SEQ ID NO: 323 - DNA, 501 bp, Bos sp.
ggagattttgctccatgttaccctctcttatctgggacatgactagtcattatggcaaggagaactgaatataacgagttatgcatcagctcttaaaggcttccatctagaagagacaagagtcacatatttcatttgccaaagcagtcatatgaccatgcccaactttcaaggaaatttaattctaccattatccagagtaaggagacccagaaatattggcaaacacaaatgattaccacaataatacrtaaggataccttattatacaagaagcaatgtgagttaagggaaacaaaaaagctagtggttcatgtaactggtaaattcaagaggaattaaaaaatgcaacaatgttattaggtctctactctccctctctccttgggctctgcctgcttcctcttcttaggctgactatctctatgtggcagtaagatgaccaccaaccacatcaagcatatatcattcacataagcagagagtccagaaaacagaact

SEQ ID NO: 324 - DNA, 501 bp, Bos sp.
tatatatcaccaacctcacacaataaatgaatacttattctttgaattaattttatttttcaatcttggtaccaattcacagacgattatttcatgggttgtctattttaggaaatttaaatttgactgctttaacacttccactgacacttgctaaggaagtggaaaaagtgcacttttttttttttttttaaataacaaatctttaaaaatattccttttagggaaaggaaacaattatcataatgtcrccttttttttgctaattctattcatcacttcatgggaaatagatgcggaaacagtggaaacagtgtcagactttatttctttgggctccaagatcactgcagatggtattgaagccatgaaattaaaagacacttactccttggaaggacagttataaccaacctagatagcatattcaaaagcagagacattacttcaccaacaaaggtccgtctagtcaaggctatggttttcccagtggtcatgtat

SEQ ID NO: 325 - DNA, 501 bp, Bos sp.
ccaaggagagaacctgagtctcctgcacctgcaggtgggctctttaccaatgagctaccgggaagccccaaactgccttcttctatctttttgtattatttgggtataaaaacacttctgaaattatctcagctcaccgtcaatatatatgcaaaaaaaaaaaaaaaaagacttttaaaacaaaaatttggccaaattgctttatacggcaagaccaactttatccacttgaaaaatactttcttgaaaasacatgaaatctccttaaaaataataccctcattatattaataatatatctgtatttggataaaataccagacaaaataatatttaaatttagaggccaaaattttaggattatttaaggaactatgaccatgtatggatgtaagagttggactgtgaagaaacctaagtgccgaagaactgatgcttttgaactgtggtgttggagaagactcttgagagtcccttggactgcaaggagatccaaccagt

SEQ ID NO: 326 - DNA, 501 bp, Bos sp.
catgccctcctccagagggtattcccaacccagggattgaacccaagtctcttatgtctcctgcaggcaggttctttaccactagcaccacctgggaaacccatagaccaaccattattctccatgccacatcttatctgtgatggaattttctaggtttgtcaatgactctgaaatttccaacttatgctgcaagaggtcaaaagcccttggagagaagtcaatgggtaggtacgactatttcaatatamtcaaaaaacagaagttaaaattttttactattagctccctagactgcaaaaatgtgtgcatcttttctcttgactcagaagtgaaggagcagtatgcctccatcgataccaaggtacaaaagagttgtattagctcaaggaatctcctagtgttgcctctgtgtagccagaacatcttgtcacaccaagccctcagcaacaactgatccatctgtttatttctgctttctgaggaagttgcctaaatgga

SEQ ID NO: 327 - DNA, 501 bp, Bos sp.
cattatagattattaaaagataataggttataattctctgtgctatatgacaaatccttgttgtttatctattttatgtataatagtttgtgcttcctaatcacatactcataatttatccctcccttcccttctcctttgttagccataagtttgttttctctctgtgagtgtttcttttttgtatatagactcatttgtgcttgtattttttagcttccacatataagtgataaatagtatttgtcttyctctgtctgacttaattaactaaacctaacattctctaggtccatccatgttgcagcaaatggagtatttcattcattttatgggttcataatattccattgtatacacattccacgtctttttaatccaattgtttgtctatgggcacttagtttgctcccacatcttgacgattataaatagagatgctctggacattggggtacaaattagagtttttgtcttttcaaggtgtataaccaagggtgg

SEQ ID NO: 328 - DNA, 501 bp, Bos sp.
caagtccagaaaagactgaaagactgtcacaaactccaggagactaaggagataaataaatgcaatgtggtatcctgctttagaacaaagaaaaaacatcagtggggagaaaacaggggaattcaaatgaagtctgttgtatgccaatgtgattttcttaattttgataaaggtactatgtttaagatgttatttaacattagagaaagctaggtgaaggatattattgcaactcttctgaaaaatctaartagtattagaaaattaaaatatcaaaaattaataattgggccttaagtgaagatggcaggcttccctgtagctcaaatggtaaagaatctgcctgcaatgcaggagacctgggttcaattcctgggttgagaagatcccctggaaaagggaatagcaactcactccagtattcttgcctggagaatcccatgatcagtggagcccagcgggctacagtccaagggattgcagagagtaggacacaactac

SEQ ID NO: 329 - DNA, 501 bp, Bos sp.
tgcatgaaatgttcccttggtatctttaattttcttgaagagttccaaagcttgtgtggttttactaactctccttcccttttaaaatgtcaaaattatatcaatgtacatgtacagataagctgttacagctttaaagatttatgtagatttatttatgaatttatagagagtcttgatagctttataatactgactttttcttctcaaaaaagattatgtcttccattcaataaaagagattaaaaaawttttttttttaattttcactagcatttacaatctttcttcacagagcacttgcatatttctagttaatgcttacatttttattctttgttgctattataactatagtctttttctcatatgtcttctaagtggttgatctttttacagtgtgtcactattgaattttatatgttgactttgtaatcagccacattactgggttcttttttagtccttaattgtgttgagccaactcttgggatttctaga

SEQ ID NO: 330 - DNA, 501 bp, Bos sp.
acaaaataagccaatattgttgttatataagtaaaccatgatacatagaattagaagtacaaggagtaatatttacatgaataaatattcagtcttattagtaagaacatttctaatttttggttgctactttatggaaataatattatgcatagatattttattggaagtatgaattagaatcttcctttatggatatattgtgatagcaaaaatatcagaataacttttataaatattaataggaaaaytgttaataaagctttagtgtatctgtattgggggacataatgatttaagagcaacatacagctagtagttataacatgaaaggagcccttattccaggagccctggaataaaattaaagaaaatatatttaaaaatatatcttcatatttagacatatatgtgtgtaaatatgtagcaaagaaatatatagtgaagaaggaatctcaaagcaatacatagaatctctgaatggtgatcacttcacagaag

SEQ ID NO: 331 - DNA, 501 bp, Bos sp.
agaaactgagcttcagttaagaccctcctactgccttggccaactccactggacatcagagttgtttcacattgaataaaaaggcctggactcatactcctaatcttcatcaaccatgaaagtgggctgctctgagaatggcatgatctgggaatgaggaggccagagctgagacaaaattttctttggaggagtatctggatggcatatcaccatgttcaccatagtacataaataatattaatctacakataaacattttccaggatatatatcaaattttataaaaatatcacccttgcattctattcagggcatgaataaacactttaaattttattttgacaatctacccaaattagcaaataaatgaaagtattaagcccattaagatctttctgaaggccaaaagtaacattttaatagcattttattaatcccttttgtaaattaccacccacttatatgttcacgtgtatgttttctatctctatccatggt

SEQ ID NO: 332 - DNA, 501 bp, Bos sp.
taaacaggtttaagtaacaggatgttgatggaattttatataacctttaaaagtgatctttctgaaggtttatgaggaaatgtttatgttatgattcaaactgaaatatttgtacaattcaaaattatatatatagtacgacagcaccaatgaaaaacacgagtaactacttacacttttaaatagtcaaatgataatctttttgactagctgggctatatttttctttgttctggttttctatatttaawtttttttaataaatgagaaaatattatgatactgcatatattacaagatcatgtaaaaataaacttcacaaaagattctagaccaaaatttataaaataaaaaagtacaattacctgtttaatgatattctttgctgtaataatcatttcttcactatatatttctaaaaaattaagttttctttgttttaaaagtccaaatacaagagagattagtctttcctagtaaaacaaaagggtatacaatgtc

SEQ ID NO: 333 - DNA, 501 bp, Bos sp.
ctagtcatggtattttagaaaaaaatgcataacattattttttcacaaattaagaaaaagtaaaatagaataaaacaattgaaattaaaagtctgttaatcagggagggaggcttgcaggggagggcgcatattaatatgtgtacctatggctgattcatattgatgtatggcagaccactaaaatattataaattaattatcctccaatcctaagtaaaataaattttaaaaaatctattaagtgaaaamgttattagttttaaaggatttctttaaatttatttggaaaattgtttggcattattgtattggttaatttttgtactaaataggtgttcccttaaagaaactccaattatccagttataaatgggaatgtctttctcatgtgaattcataactctctcacctaatttataatttcccatatttataacttttgttttaaaattgtccacttttattttaaaatttgctcaagttctttggtcaaattcca

SEQ ID NO: 334 - DNA, 501 bp, Bos sp.
cagtcgtgtccgactctttgcaaccccatggactgtagcctaccaggctcctccctccatgggattctctaggcaagagtactggagtgggttgccattcccttctccaggggatcttcccgacccagggatcgaacccgggtctcctgcattggaggcagacgctttaacctctgagccacctggaaagccagagccctatcctaaaacagttaaattgaggtcacagcacatgtgtgtgtgtgtgtgtrtaggcaagcaaacattgagattttaaaataaaaattattttccattttaacctcataatttaaatcataaagatttgaacagaaaaagttttggacatttccaatgaaagttgagttcaaaattatggaggaaattacctttaaaaaaagctgtgttttttccaatgcctttttagtgattctaaaatcatagttaaaggaatggatctattaattcctttaaagctactgctagcactaagccaagcgc

SEQ ID NO: 335 - DNA, 101 bp, Bos sp.
taacttgcatattgtggaacagcaacattgtgattctcttgctctattgaratgctttcctgttaattctcaattgaattgagcattccatgttttctgct

SEQ ID NO: 336 - DNA, 101 bp, Bos sp.
gaatcgacggactacatttgcccaatggagcccagcaacagtgttggtgayggtcacagggcctacagtggcacccggggcctcagcacacttgatgcccc

SEQ ID NO: 337 - DNA, 101 bp, Bos sp.
ccagagttttggctgcagggacagagcagggccttctgctgtggggacaayggaactgtcgtgacttcattcagaggtggtctcttctttcggtaataaaa

SEQ ID NO: 338 - DNA, 73 bp, Bos sp.; identical to SEQ ID NO: 142

SEQ ID NO: 339 - DNA, 101 bp, Bos sp.; identical to SEQ ID NO: 136

SEQ ID NO: 340 - DNA, 101 bp, Bos sp.
ggttccaggggggcagccctacctcaccttcacctgtcccatcccccttcrgtgtggtggtggccaaagtgctcccagggtgctatacatcagagctgggc

SEQ ID NO: 341 - DNA, 101 bp, Bos sp.
ggacttccccaacccctatcgtttcccctgcatctcggggcccaggatgcrgtctgacctgacccacaccaaatagcattgagctgtaaacctttttttat

SEQ ID NO: 342 - DNA, 101 bp, Bos sp.
gcgttcctgcccctgtcctcgtcactatgtagctgaggggcaggaggcctrttccacgttctggaaggttcttgggctcgaccacggcagtagccccagga

SEQ ID NO: 343 - DNA, 501 bp, Bos sp.
tcagaagggaaagaaaaatgcatgtgtttagtctgccgtctttatttgcaagtccaacagacattcgggagtccttgctatgggcatggtttgtactgacaactaagcaggatccagaggcgggcggccccaggcccgttaagagcagagggctgaaccccatctgggtcagctctgccgtccccaggggctgcgtgttgtaaggttgatgcccttgagctgcatggtggcgcccatggcaagtacgctgkgtgaatccttctttttccgtccataaacacctctcagtccgcattgtaaaccacttcacctgggttcacattccagctctgccactttcttgtggcaaagttacttagcttctatttcattttccttgtctttaagacaaagtcattatagtatctgcctcttagaattttatgagaattcaacaaattgtgcttagagcagtgcctggcacagtaagctctccttcagtgtcagcaactaccatcatga

SEQ ID NO: 344 - DNA, 79 bp, Bos sp.
catcctgatggggtcatcccagtgctgactttcctcagggatcacagcaaygcacaattcaaatccttggctgacttga

SEQ ID NO: 345 - DNA, 501 bp, Bos sp.
gctttctgcctcagtgggagacacaccaaaatcagtgccccttggactgtgatctgtgctgtgctgtgcttagttgctctgtcgtgtccaaccctttgtgaccctatggactgtaacctgccaggcttctctgtccatggggattctccaggcaagagtactggagtgggcagccatgccctcctccaggggatcttccccctggatcttcccaacccaggtctcaggaatatcacttaccctcactgggyctcactatccttatctctgacatgatgggactggaactattgacctctaagatctctcttcagctctaacatgctctggttataagcacctttggatgacggcaatatttataggcaatgatatgactagagaatatttagactgattcatagtctgtgtgaggcagagaagaacatgcaaagtcttttgggaaagaagttatttttgagtgctgtaaaaccctagtaataaaacacaaattcaaaaatg

SEQ ID NO: 346 - DNA, 501 bp, Bos sp.; identical to SEQ ID NO: 123

SEQ ID NO: 347 - DNA, 501 bp, Bos sp.
agactcagatatcctgcattggcatgtggattcctaaccactggaccaccaaccaggaaaccctcacgttatgttcctattaacacctccatcgacttctcatccctcttgtctgttcctttagtcaagctggctgcccacatcgcattgttttaattactataaaccttctaatgtgatgtatcctgttgtaatgctgtttagtaggagaattgcccccaacttttattatccttccaaatagtgttggyagttcttatacactcactgtccatgtgaaaaaaatcaccatcgtttgcagtgtaaagaaatacgctatcgtggttatgctagctgatttgcattgaactgatggcttactccaaggataataaacatctttaaagatcattgcgtcttccctttagtgggaagtgaaagttgtccaactctttgcgacaccatggactgtccatggaattcttcaggccagaatactggagtgggtatccttgcccttcc

SEQ ID NO: 348 - DNA, 501 bp, Bos sp.
agcccaccaggctcccctgtccctgggattctccaggcaagaacactggagcgggttgccatttccttctcccatgtatgaaagtgaaaactcaaagtgaagtcgctgagtcatgtccgcctgttagtgacccatggactgcaacctaccaggctcctccatccatgggattttccaggcaagagtactggagtggattgtcatttccttctccattttttagttctatggaaacacaaaagactttgaayacaaaacacaaaagtctttgaaaagacacagtaatcttgagaaataacagagctggagtagtcatactcccagattttatactatattacaaagctacagtaatctagacagtatggtagtggcacaaaagcagaaatatagatcaatggaacagcatagaaagtccagagacacatccatgcacctacggtcaattaatctacaacaaaggaggctagaatataaaagaatagaatggaaaagacagtc

SEQ ID NO: 349 - DNA, 501 bp, Bos sp.
attggtcagtttcatgcaggtctgaatatacacattttgattgaatttgctcaaaagaagatagctgcactgttaatcatatttattagttgatcttaagaattcatgcatttaattgttctagaattagagataaaccttggaattatgactgtgagaaatggccaagagtttcattggggatgacagaaggcaatgctgagcaagaaggaggtttgaaatcctgcattaattctagagttcatcaaccyatgactatggaaatctcgatatatttgaattgcaaaaatttataaaaaactcttaaatactttttgtccttctgttttctccttcaatataagcctacaaaattataaggtacttaagtgttgggaccatgtctctgaatctttaataacaaacacactctcatagtaggtgtccaaaactatattattgattgttttatatgtgagttggagaaagatgcataaaaatgtctaagcatgctagaattct

SEQ ID NO: 350 - DNA, 501 bp, Bos sp.
taattaggatactgttccaagaaattggatacatattactgtgtaccaaatattatagtcagtgctgatgtcaggatcactagtgaattaagagtcaaatggagaaacagacatggaaacgggaatgcagactatgatgtaacaaagaacatctggataaagctgaaagaaggtcatacaagattaacagtggtgccaggtctgacgcattggaggcaagtgacaaatatctaataggtgaatgaatgaayaactcataaaatgattttttgaaatttcttttaaaaatgagtttgattttaatttactaatcaattaaagatagaatttatgggaaaatggaaaactctggcagggtcacagtttgtagactgatacaaaaggagatatatttctatcaatgaaattgtttgatacaatcaggacactttaagatccttaaaaattattcagagcccaaaagagcttttatttttgtaggctaaagtccttaacatttac

SEQ ID NO: 351 - DNA, 501 bp, Bos sp.
tgatgtcaggatcactagtgaattaagagtcaaatggagaaacagacatggaaacgggaatgcagactatgatgtaacaaagaacatctggataaagctgaaagaaggtcatacaagattaacagtggtgccaggtctgacgcattggaggcaagtgacaaatatctaataggtgaatgaatgaacaactcataaaatgattttttgaaatttcttttaaaaatgagtttgattttaatttactaatcaaktaaagatagaatttatgggaaaatggaaaactctggcagggtcacagtttgtagactgatacaaaaggagatatatttctatcaatgaaattgtttgatacaatcaggacactttaagatccttaaaaattattcagagcccaaaagagcttttatttttgtaggctaaagtccttaacatttaccttcttagaaattcaaactaagaactctaaaagatatttattcattttaaacaaaaataaactca

SEQ ID NO: 352 - DNA, 501 bp, Bos sp.
tatctatcatgtccctgtcttttctttctaaggcatttcctgagtctctgcacagctgaaatagttcccttattaagtaacctttttccacccttcattccccttcaggcttccctgtgaccccagttgaatagtaccacattgggtttccttgtgggggtgaagactttgcggtcctttctccagatcagcagaaatatgcatctaggaaaccaaacgagcgtctctgaattcctcctcctgggactctycacccaacctgagcagcaggagctcctctttgcgcttttcctggctatgtacctggccaccgtggtggggaatgggctcatcgttctggccatcggcttggactcttaccttcacacccccatgtacctcttcctcgccaacctagcctttgctgatattttttccatttccacctcagtccccaaaatgctgatgaatattcagaccaagagtccatccatctcctatgagagctgcgtcacacagatg

SEQ ID NO: 353 - DNA, 501 bp, Bos sp.
cacaatacatggtgggaaggccaggggactcagagttcagagactgggtttctgaccttctttgccattttttgcatttggtgctttgtgctaagttgcttcagtcatgtccgactctgtgcaaccctatgagctatagcccgccaggctcctctgtccatgggattctccaggcaagaatactggagtgaattgccattcccttctccaggggatcttcctaacccagggatcgagccggtgtgtcttaygtcgaacctgcattggcaggcaggttctttaccactagcgccacgtgggaagcccttttacgtttgggctctgggttaattcactctttgccaatgttcttgcctcttgatgcttaattcaagcaccttaattcagcactgactttattcacagaaaacagtcttcagaactgtggattctgtgctgggactgtgcagtgttatcatttcttttgaactccaggttattttgaaaacatggggtgtgtgt

SEQ ID NO: 354 - DNA, 501 bp, Bos sp.
ccagcagtcccacagctgtcaccacgatccttttaaaatcacaatctgattccatcactccctaacctcaaacttccaaccacttcctatcacatgtagaataaaatccaaagatccttgccatagtctggagaccttacatgtagatccctgcttatcagagacctcccttccttctgtgttcaccattacagccgcagagttttcctggatgggctccaaacgtcccaggccagcattcctccagggtyggggcagagtgctttctccgacagtcctacacacaccagaaccctgctatcactctctatcccctcgctccgctttatttctctacactgcactcaggattatattacacacgtattagctatttctctgtataccacgtaaccacgagggcaggggttggatctgttttgttcacaactacatcaacaatgcttaggagaggtctggcacaagatggtctctccaaaagtatttggagagtgaatgaag

SEQ ID NO: 355 - DNA, 101 bp, Bos sp.
actttttacgaggaccggggcttccagggccactgctacgagtgcagcagygactgccccaacctgcagccctatttcagccgctgtaactccatccgcgt

SEQ ID NO: 356 - DNA, 101 bp, Bos sp.
cagccactaggtggcgctgctgagccaggcccactcccctggtccacagcygggccagcagtatccgaaagtgatttccatccagaccgacatccctctga

SEQ ID NO: 357 - DNA, 101 bp, Bos sp.
actttgcccccttgtgcatcttcataaacctgctgtggggactcctcagcycgtaggggctcagggtttcctgagagccagatgtcctgcagagttgctgg

SEQ ID NO: 358 - DNA, 501 bp, Bos sp.
aggatcattgcgtttttggcaaagaaggaaactgtgactcagaggagggaagctcctggcccaaggctgccctgagcaggagagtcgggttcgggtctgtgggtctgactctgtccttccaagtgctccaagatctcctcagctccagtgcacacgctgcagatgcacaatgctcacattcgcacacatacacatgcatatgtatgcatgcacatgcacacacggcatgcacaaatgcatgcacacacgcraacatgtatgcagccacgtgtacatacatggcccacacaaatacatgcacacacatatgtatgcacgcacatgtatacacatgatacacacaaatacatgtgtatatatccgcacacagacacatatgcacacatgtacatacatgaacacacaggtacataggcacatgcacacaaacatacgtgcatgcattcaaacatacacgtgcacacacatgcataaacacgcatgttttcacatacgtgcgtg

SEQ ID NO: 359 - DNA, 501 bp, Bos sp.
aatatttacagtctatggaaagaggtaactgacaaaaatgagatcttttatcactgtgtcaaagtaaatacactgagaaatatactaagataacttactaagattactaagtgcaaagcagaaatcagacacagattctaggtcaagtttttagctcagaggtttattttgaccaaggattgcttgcacggtctttaaaggtcacagaggtaaaccatgggagggtcactgggatgagacgggcaatgctrcacaggtttccctgaggcctgagtgccatacaatgaaaccgagttgagaacacagcactgttccgtcaaactgcctgattcagcaggtgctatgaactgagcatcagtgcccacacagacaaggtggctccagacacagcaaaaaagacaacatgctgggagccaacggcaagaaacgtcaccatcgttctcattacagcgatggccgcttcttctttaataacacggtgtccttctacagataaagtgt

SEQ ID NO: 360 - DNA, 501 bp, Bos sp.
tatgagatgcagaattccaacgaatgcaagaggaacttcgtggcagtgtatgacggaagcagctcggtggaggacctgaaagccaagttctgcagcacggtggccaacgacgtgatgctccgcacggggctcggggtcatccgcatgtgggctgacgagggcagccgcaacagccgcttccagatgctcttcacgtccttccaagaacgtaagtgtctccgctcttcgctgctcggccttccagtgggtcrgagggtgcagatctcatgcactgtgaatggtgtttccttcatgcagcttgagccttaataagttgttcaaaccgcttagattccctttccttctctttgatccagaaacaggagagttacatatggccttttgattacttacatcagcatatgcagggcttccctggtgactcagatggtaaagactctgcttgcaatgcaggaaacccgggttggatccctgggttaggtagattccctggagtaggaa

SEQ ID NO: 361 - DNA, 501 bp, Bos sp.
ttatgtcacacctttgcaggtaaaacaacaaagcccattgatcttatgaaccctttcataaaatttgttccaaaataaataaatctatattttgcacccagaagcttagtttggacagtctttttacttgaattaatatataataactcctcttgatttgatataaacaaaacatgaacccaggcacatcaccctctgctttagacaacagagtgaatgatcaggccctcatccccctctctctggatacrtacagtccagccgaggagataaacacacagctatgactgtaaagcggacctgaccagagccacagtcacaccagccgtggcagttcagagtgcccacggggggaggctgtggacctctcacctggacggcagtgacaagtcttgagattcactccagacacatctcagtttctccttcatccacttctccacatgcattctctcttcttcgctttctcaggaggtaggggtgagcgctttctatctcata

SEQ ID NO: 362 - DNA, 501 bp, Bos sp.
ccctccctccctccggctaattctctggagcgtggaaacccaccaagctcactctcctgcctgggctttcaagacctcctcgagaggggggccctgtggcctcgtgagtggtgcaagccctgttctagggttttactggttctctgcataaaccagggaatattagcttctttcaatctttcactttcttatcatcgactctggaccaccaggttccggtccgttaaaggaccacaacagcagagtacacragaaatgctgggctgggtgaagcacaagctggaatcaagattgccaggagaatctgctgttatgcagataacaccaccctttttgcagaaagcgaagaagaattaaggagcctcttgatgaaagtgaaagaggagagtgaaaaagttggcttaaagcacaacattcagaaaactaagatcatggcatctggtcccatcacttcatggcaaatagatggggaaatggtggaaacagtgacaggctttattg

SEQ ID NO: 363 - DNA, 501 bp, Bos sp.
ccccgagctctggtcatgtaaccaggcgagaagttaaggaaacacaagggagaaaagtggcaatctctgagctccaaagacattgaaggaactcaactccaccaccctgaaggagacacactggaataaaagtgtcaaacagggcctcaaagctctagctccgcgtccaactctaagagcaatcgatgctgaaacagtcccccaaaggcagcacggaaggggcagaactgagagtggccttgaaaggcccrggaaggttgaaatgggctgtgatgaagaaagtcaacttcctggaggaagttactaagagcaggagtcaggctcaggggccaaagcagaaatgaagaacactgggattagcagcaagtgaaagaaggcttctaaccccaggatgaacagtcattgccagatcacacagagttatctttattttcttagaagtgacagaaagaaatctgaggtttaaacagatgcctgatagtggtgctcatgacagactga

SEQ ID NO: 364 - DNA, 501 bp, Bos sp.
gaacagagggcctgtttccaggggaggattactggggagacgttccaagaaggcggggaagcgaggccctgccacgaagcggtcatctcaaagccaaagctggacagatggagtccccactgggatctgaggaccaagcagggtccaggcaggaagctcgggaacaaatgcacagctcagagaggggacggtgatcggaggcgtgtggagtgaccacagggcagcacaagcactcagatgtctgtccaccrccatgaccggcagaagacgcagcttccacagtgcacatccaagccatgtgacacgaggctggtgaaggtcgtctctcctcggccccaggtggagagaggagagagacagcacgtgcttgggaagtccaagagacctgaacttaattcctggctcccacagcatcaggatgaccttgaccccgttatcaagaccactgctcctgagttccctcatgcgagaaatgtcattaacgccctcccatggatgcac

SEQ ID NO: 365 - DNA, 501 bp, Bos sp.
  polymorphism (251)..(251)
  misc_feature (469)..(501): Nucleotide unclear for positions 469 to 501
gattctataacagagaatgagtctcttcacatcaggccccataagcatctgttacctgatgttctcctacatttaatcttatgaaactattcttcccagaatgagtaatattgttcccttcaactccatgcctttgcaaaattctcttatttttaaagaatgctcttccctgtttgatctgcttagccaatacctactcattttttaagaccctgtgttatgctttctttgatcactcccaccttccccargcttccttcccatgagttgactatgttcttgtgtcactatctctaacacatatccttatcaaatactgtaatacgattatgtactgacatcttgtctcccccactgtgacaccgagaagggcctggtgggactcctgggcacaaagcctttctgtgcccatgaccttccctgagttccaagggggaagatacaaccagttgttagttagagaaaggannnnnnnnnnnnnnnnnnnnnnnnnnnnnnnnn

SEQ ID NO: 366 - DNA, 501 bp, Bos sp.
tatcatttttatgtctgaagtttttgagaatgtacatgtttacttataatattgggatataaattaaactattcttttaaagcacaattttattagaatattttatacctatactatatgttctgaaagtagatactctttcataggcaattgaaatatatatataaaagaagagaaaaaggcaggggtgaggtggtttggcgttttgggcttagcttgtttttcaccattccagtggtttggctgtttayggctctttctccagtgcattagttcccctgtgctcccataacacactgacacaaactaggtggtttaagaacaaaaatttattgtctcacagttctagatgctaagttcaagatcaaagtgacagcagggcatgttccttctaaaggcactggaaaaggatgtgttccagccctctttcctagcttctggtagtgcccaggattgtaacagcataactctaatcttcacagggtattctatcagtgtaca

SEQ ID NO: 367 - DNA, 501 bp, Bos sp.
ggggaaaatgcttctattttcttttaaatcctgagtttaatcctgagtcattattatttatctacggggtccaatggacccttttattaaaaagggtcatttttaggccatttaacaaataaatcagagataagaataaggggaatagtgaaaatagctatattaattttttagtttattattatttttttggccacaccatgtggcttgtggaatgttagttccctgaccagggattgaacccaggtccrtcgcaatgaaagcaccaagtcctaaccacttgactgccagggagttttctatagtaaaaattttaataataatttaaatagtatttgcattgtcaaaggtaatattttgaaaacttggacttttattgaatagtgaactgctatcttctttcctccatatttacaaaacatttaaaattttagatttatgagcaccaattagaatgactgtttcagtgactattttggcttatatattatgtattttctt

SEQ ID NO: 368 - DNA, 501 bp, Bos sp.
aaatttcttccctattgacccagcgagtaaagaatctgcctgcaatgcaggagatacaggcgatgcgggtttgattcctaagtcaggaagattccctggcggaaaaaatggcaacccactccaatattctggcctggagaattccatggacagaggagcctgaaaggctacagtccaaagaattgcatagagttggacatgactgagcgactgagcacacacgtttctaggtaatgctgatgcctctggayggaggaacacactttgagaaccactctgctggagcatttaattcaggagccaaaatcttagatggacaagaggccagcgggggaggctgggaagtggcgctggtggggtccatggccagccaagaagcatgtaccccctgaaaagaaaacagctgcgcctcagccacagcctgtggttgccatttggaaatgtgctgtgagcgttattagattctccacttggtctggataaagtctgggaatctcaaaa

SEQ ID NO: 369 - DNA, 501 bp, Bos sp.
taaaaacaaaagtatgtagtatgttactgatgacagtgttaaagatagaaataaagtggggataaaaagataaaacagagtacaatttttcactgtttgcaaagggaaggtctttgggaggtgaaacagctagaaataaatgaaggagccaaacttgagcagatgtgtgggggagaaggggttggaggagctgctacatgtacagggggagcaggtgatggagaagcagcatgtgtacagggggaggaagstgcaaatgcagagggaatcacagtatgaaggcatcagcatggcagtctggaagttctgaggaaaatcacaaagtccatgagcagcgagagtggaaggagggccaggaggacagacagcaggagacgtgggtgagaatggagcaggcagaggtgaaacgctcagttagaaatggcctatggccactctgaggacttctgattgtgaactgtgctctgacttctgttttcactctgattgctcttctggaaa

SEQ ID NO: 370 - DNA, 501 bp, Bos sp.
cactgtgctgctgctgctgctaagttgcttcagtcgtgtccaactctgtgtgaccccatagacggcagcccaccaggctcccccgtccctgggattctccaggcaagaacactggagtgggttgccatttccttccccaatgcatgaaagtgaaaagtgaaagtgaagtcgctcagtcgtgtccgactcttggcgaccccatggactacagcctaccaggctcctccatccatgggagtttgcaggcaagmgtactggagtgtagttcctctttgttcgtgcttcctcccttctcccctccttccttcttgggtcatagccaagaagtgccatgccttttccaagtcaagtagtgagaattctgtttgtcttgtacaaactcaaggtaaagtgtaccctcacttcaaaggaagctggaaattcacactcactggaagattaggcttttagatgttttgtttgttctttttttctattttacttttcctcccttttacaaca

SEQ ID NO: 371 - DNA, 501 bp, Bos sp.
aacatgaagatggacatggtttctttgacagggccttgcaatttggtggcatgcgttcagggagtgccaactcatttgaatatctgcctaattaggaaggtaaattagctgctcctgctgccagcaatcacaccacgcactgcaaagccaagtatacgtgcctctggtaacacacacggtcatgaattcttcacctcccatgcctatccctccagcagcgcggtggacaatgcagaaatgaccaaactgcrttctctgtccgtcctttcctctctcaccgaggtttggctctatcacgtggactggagtacagatggtttagaattctgagggcttgaggggtgaggtgacacaaagggaataaaggactttgttaaccccgtcgacttaaaagaacgcacaacctgagagttgtgagttacgttttatttggggcaaaatgaggactgcagcccgggaggcagcacctcagatagctctgagaaactgctccaaagaggc

SEQ ID NO: 372 - DNA, 501 bp, Bos sp.
ccctaaaaggtagattttgaccagtatatttataatgaatgttctagggaatgggggcttttgttaagaaaccaaaaagaaaacccattttcccattgcatcccttgttatcctagtggaaagggaaagaaagagaaccctttttacccttcctttttacagctggtaactgaggcataaagtgataagttaccctctgggtggatctgggacttgaacctggctctttgtttcactaaagggcagaggtyctttgagggtggagcaatcacatgtgattcctgatccatccttctgggagggacatagcagaatactgcactgttaaaggtgctcagcaacatctctatcaatccagtgtgcatcagaatccttagagcacacaaagggggaacaaaaggggcaatcttcagaaatattcattagactttcatgtttagaaagtgcatgtttgtatgataaactgcttagcgaaagtcctaataaaatcttgactaatga

SEQ ID NO: 373 - DNA, 501 bp, Bos sp.
tcaacaaagtaatgtctctgctttttaataaatagcagttagtttctgcttccaactataccccctctgaatacttaataacacggtgtagcccagcaagtgccacagaagactggagtttgtgtcactgtaacactatgcagtgtggacccttgaagaagaatgggactgcccacattgtctgcaccctatctttagtgcagatgggatcatcataggcaagttgctgtccttcatggaaaacaccagcsagggaagtctgcgatactttcagagcctccatctcagggcctcggatagtagcatcagatgtttgtagcaggaagtcaaatttaatcggtttctctgtgacagatttaaagtccatcaggtcctggggaaagatcatctgaagagccagaagatgagctcatttgcctctcctcaaagacaagttagtgaaaaaattcaacagaggagtgtttagcaggtggaagctcataaatctgtcagcaaacttta

SEQ ID NO: 374 - DNA, 501 bp, Bos sp.
tagtcaggagactgaagctatatgaggggtactcccttccccaaggctgagatttagaacatattggagagactatggtttggctgctggtggcagagaagtttactggatgccttgggctgcagttggtgtccattgggatgctgagaaagtttgctgaagagcaggtgatagtgggctttctgcatgctcctggaagctttgccatcaattgaagacaatacaaactgggaagaagagaagcccctttrtttgttaccttgccgtgtctctctaagtcatgtctgactctttgtgaccccatggactgtagtctgccaggctcctctgtccatgggattgctcaggcaagaatactggagtgggttgccatttccttctctagcggatctttccaactcagggattgaacctgagtctcctgcattgcaggcagattctttactgtctgagccaacgggaagcccagtgtcgctctagagccctttactgatgaagcct

SEQ ID NO: 375 - DNA, 501 bp, Bos sp.
ttgggcttgatcagaagagagagggagcaagaagtaaaactcctaagaagctcttgcatttggatagaaattcatctcacctgatgcacatacaccagccttgtgactaggccagggaagcttgaggaggtgagtgcccaaaggagggtggtggcaacaaaaacaaaccagaggaagatggcttgagtgcagcttgacttggtgattagttgcggaaaatagaaaagtcaggttgtgtgtgggtgtctgamaaaggcacatgagcattctgaggacagaacttttaaaaatagctcccatcccctttatactatagaataaatagaacaaagcattttgaactgttttacaacgatttccccatgggtagataagccagttcataaagatctatataaatgaacacacgtattttttatttgtcacatgctctatttgtttcatttttttcccaaagccatctgtgcctgtccttgactttgttctcttttgactagtctt

SEQ ID NO: 376 - DNA, 501 bp, Bos sp.
gcgctctccagtggcagccagggccaccgcagtttgcatccaggggctggcctgtgccaagcacccaccggaagccaccagccggctgagggcccctcaagggactcaggttgcacatttgctattttgatccaacaatgcaggccccttccggtttcaggagccggtctcctggcactcatcaagcgcccagcttcgagaggcttctgagagccagggagcaagcttccagcctgaagggagggtgatgygctcctggttttaaatccccaactgaatgccaaccatatctggttgtcagcagagaggggaagatcaagaggcagtgatgggagagaatggagaggtggtaacaagagctaaaatttattgccctgaagcttgtgttctcctgggaggagagggcactgcccactgggccgagggctcttctgtacccggcactgcctttgccatggggtggtgggggtggttggggggggtggtgttccttgagtggag

SEQ ID NO: 377 - DNA, 501 bp, Bos sp.
acaatcagaaatttattatcttacagcaaagtaatgataattctgttctttacaacatgcgatactataaaatctttatcttggaatgtattctttgaaattaaatgcatcagagcaataatatagtctccatgatgttaggatcatccttagcaaaattctaatgggaaatgtaaataccagatatttctgtttcccagtcatctctaagactgtataacacaagaaactggcttatttgacatggctgmttagacagtcgtcttaggaaatacttattcatggggtgttctacctgttttccttaaacaaaactaaatgttgtagcaggcccacccctcacattacgatgggtagaggcgagtaaaaacggaagctgtatgtttaagtatttaaaagctaacagagttttaaataaagtatgttggcttttcctaccttgacaaatacaacttcatgacagtttggaatactgtacctgaatgtgggagcataggaagc

SEQ ID NO: 378 - DNA, 501 bp, Bos sp.; identical to SEQ ID NO: 117

SEQ ID NO: 379 - DNA, 501 bp, Bos sp.
atgggattttccaggcaagagtactgaagtgggtttctaccaatgaactattccacccaccaaaaataaaagactttccattgggtctctagaggtagggcccattgctgcatggttcattgctgtattcccaccacagtgcctggcataactaagacataatataagcatgtaatgaaataatatggagttgatgctgctaatcatggaaggtgctacaaaatgaggcctgtgtcctcgattacaatggytcctcttccctgagatcctccacttctcccatccctttctgcatcccattgtggaccataaggaggcatgactaaggctccacgtctgtcaccatggctgcaggcccacttgaaatgctgagggcactctgccttcaccaaggctatccagaacagcacacaaaccctacagttaagaggtccagggacttccctggtggtccagtggctaagactccctgctcccattgcaggggttcttgcttcgatt

SEQ ID NO: 380 - DNA, 501 bp, Bos sp.
gaacgtgggatgggggttgcctccactaacttgtgatgccagcttgaatgtgattcctaagttcttggaacatcttggtttcctcatctgaaaaatacaggcagggttgtagtagtgaggaacgaacctgccacacagtgctaagtaaatccgaatctcatgttaaaaaatagagtagttactggaacatatttgtctacataaaggtcctctgcatgcaacgtaaatctccttaagacttattgctgctkcttctacagttcctggcacataactgcgacgctggtgagagagacaacagctacatcttgtgcgatgccattcagatgacattccagagaaggtaaaattacagggatagaaaacaacacatcagtgttttttgtttttttttttaagatgactgggaatttggtttatgccaagttacctgagattactatttttaaaagatatttatttatttttggccacactgtgtagtatgtgggattttagttc

SEQ ID NO: 381 - DNA, 501 bp, Bos sp.
gcccaacatccgctgatggaagccaagccgtgagacccattatctcctcatctttgtccactagccttccagagtgacctctgcatcgctcacttcagtctctgggttctttcacttcctccctggggattgttctgcagtcacttacagaggtgctctcgagaccttgctgtccttcaggtctccaccttaaaccaagaaagcctatctccagtcctggcagctttcttactttgctcttgtgaagctcrtctttcaacctcacaactcctaatccagaacaacctcttattctcctccttagagagttccccatggcttaatttttttaccacttggatcccattggctagtgcattctcagctgtacattcaaaccatagtgaggtatcattacataccctgtagaaggcagaaaagtaaaaggactgacagtgctaggtgttgatgagatataagacaaggagcaactagaactctggtgggaatgtaaagtgttac

SEQ ID NO: 382 - DNA, 501 bp, Bos sp.
agatcaggaatgaggcactctgtgctctggaaaaatctggcagaatggaccttcagagaattagatattttctggagaggattttatgaacccaattgctcgcatcttctcatatctacaaaagtactaaaaatcattaatggggacagctctccctcgtgactaggagtgaccttcttgtgactaggagaaaacctctaccaaaatgtgtgcttgactgcccatatcccccttcaccaaaatcacgtctrtactgaccttccctccagagcagttccgcagagctctctgagaggctgtctcctgggctagagcccatgttttgctccaaataaaatttaactcacaacccccacattgtgtttttttttctcagttgacactgtcgaggttgcaaagtgaagtcatgtctcccctggcttcctccagcccaatcatgttttgtttacctcactcatctgggaaaaaaaaaaaaaatcaattttcccaactagcaatcca

SEQ ID NO: 383 - DNA, 501 bp, Bos sp.
taggtttgagccttaaactaaactaaacactagcaaagactgtgccacatggacaagcaccactgaaagcagatgccagtactaaagcgaagagcccagaggaagacccatcaggttccaggattttctgcacccagaatgtagcaaggcctggcttggattccatgagattcatatagcatattttactcttctagcttcttattctagactcaattttgtgttctcatggttggggttctgttttcttycccttctagacagctcacctgaagatcttattttctgcaaagatgtgaatcttttctgtgaactgtttaagaggcaagcttttaggaatacaggatcatttaaggaaaatctggttttacaaatttaaatttattcagggcgaaaaacaagccatttcacaagtctgcgattgataaaattatgagaaaaatcttaaggaagaaacacaggcctgagggatttggataataataacctgcagctgctttt

SEQ ID NO: 384 - DNA, 501 bp, Bos sp.
agagtcactaataaggatcattaagaatttattgtaatatagtaccccttgtatggaaagctaagagcaccaatttaggcgaaatagtaagatttggaagttagaagggactttagatagtcatttctcatattggtatttagggtttaatttttcagagaggttttgggtaccgtatttcatttacaccttagtgatccactccacggtggcatgtgtttcttatattatccccatgcttctagcagatrtttataacctgtcaggaccctctttcctgctaaaattgttgttgttcagtcggtcagtcatgtctgactctcttgtgaccccatggactgcagcacgccaggcttccttgtccttcattatctcaggaagcctgctcaaactcgtgtccattgagtcagtggtgccatccaaccatctatctcaccctctgtcaccttctcctcctccagccctctgtctttcccagcatcagcgtcttttccagtatgt

SEQ ID NO: 385 - DNA, 501 bp, Bos sp.; identical to SEQ ID NO: 29

SEQ ID NO: 386 - DNA, 501 bp, Bos sp.
gagcctggtgggttacagtccatggggtcacaaaagagtcggacacgactgagcaacttaacaacaacttagctccactgacttttttcctctgggagtgaaactaagggaagggtggggtgggggaaattatgcatgaaaacctctcagtctgaagacttattacctaaatataaatctcactacatgaaaggagagtgattgttctgaggcatcaaaaactgtcatttttgtttagtgagagatagtgmgtcgtcgcggttaggaaagtagactattctgccaggctgccaggttcaaaccccttctctgccactcactatgcttgtgatttggggcaagttctaaagtttctgtgcctcagttatctagtctgaaaatgggtgtgataattgggttgttccaaaggtgaaatgcatttaacaagtttaaattgtttagaacagtgtctcactgatagtaagtgcccagtatatattagcgactattagccaacttcta

SEQ ID NO: 387 - DNA, 501 bp, Bos sp.
tgacattctttcaatttttctatatttttgaaaattttaaaagttaaatgttgaaggccaggggaagagtgaatctgaacaacagattgtttacagcaaatatctgaattttcactaatggtctatgcctacattgactttgataaaatgatttcaaatcattttattttgatagtgattttcaaaacttgcatgtgtgcaaagattgtgtgcacactttccaggaaggagacgctcccacaggtaaagartggaggtagtgagtaatacttagatattgttggtagccagtgtgttggatacctgagatttggaggatatggccatgggtgttattttaacttttaacccaataacaatgtgcttcacttttgcttcagccacagtggtggcaacaacagcctagaagagtaatccaagtctttgggttgtcatcttcaataaaggtattcttattcctctattgagggaactctgctcaatattctgtaataacctaaa

SEQ ID NO: 388 - DNA, 501 bp, Bos sp.
acaaaaatactttttaaaatatcttcaaaaatcttagagatgaatatgacaaggtgtttgcaagatttttatactaaaaactataaagcattgcttaagtttcctaaaagaagacccaaataaaaggacagatatgccatgtccacatgtctaaaaacttagtattgctgccatgtcagactctcccagattgattgattgcttggccgtaccctttaggcttaacaccccgagacagcacttcatcactragtcatgagttagactcctctacctgttttttattttcagttcagttcagtctttcagtcatgtctgactctgtgaccccatggactgcagcacgccaggcttccctgtccatcaccaactcccagagtttactcaaactcatgcccattgagtcagtgctgccatccaaccatctcatcctctgtcatccccttctcctcctgccttcaggctttcccagcatcagggtctttcaaataaatcagttct

SEQ ID NO: 389 - DNA, 501 bp, Bos sp.
aaaatgagaaagataaaaccattgattctaaagcttagaatggagccagctcaggccactgtcaaaggcctggtcactgagtgagagagggcagagaggaagctgttacagtttgggggctgtgtgcagattctcatgcattagggctgaggtccagcaggaaacctgaaattgggttcagatttggacctttctttgtggagatggcataacttaacagcaactcggttttagggaatgactgaagagargattgagaaaggagcagagaggaatcttgtgtgcctttccttagaagtcagcaaatctcttccttactggttcattatagatattcaatggcataatgcagggaaagtacagataacaatgctgaaaatagacctagctacgataagtaggagacggcagaaatatttgttgaatcgactttatcattttctcaaattgtctatcctgctttctttcctttgtcttcactgcaggaaattgagttttggg

SEQ ID NO: 390 - DNA, 501 bp, Bos sp.
agttaaataaatctgtatctgtttattgaaactccttaagagaaaaggaatgattagcaaattactaagaggcggcttttctctttgctagatttaaccaggaatttgtgtgtgtgtttgtatgtgtgcactgtgttgtgcgtttcattaatattcctcttatttttattatttatccttctcattcactgttatgctgaacatagccagaaaatgaggtcaactcaacatttgcttttgctcaaggctayatcaggcaaatgaattctttgtccaattcagaagagaaataaatcaattacccttgctgaagggtggctatcttgagtgcttttaggaaaaactcaggtcattctaaagaaatgtctgaaatatctgcaagagttaagagcaagataagcactaatttaccatctccttcatccccataaggaggtacttaaaagaggacaaaatgcatcactaggtattgtcagggtcaaactaagacttcagtatttc

SEQ ID NO: 391 - DNA, 501 bp, Bos sp.
tcatttgattctaacatttggattatggacatgatgttgctgtgctgtccacggattatatatcagtgtctaggcatctcacactcatgtccacaatacagctgtgtaacgaggagcactctggacattggcatctggctcatagccaggagaggctctgcccacccagcccctccaatggggggacagtgccttttgcctcttgcatggtggctgggtggtgctcacatcataaaccacatcctggaggmcttccaagtgtaactgctcattaaagcctatttctgagggccacggggttgggtcactgcaaaccatccaccaggtatgaagtggaaagcaatggcctttcaggaacacacgtggatcagtgatgaaggactggattggccaaaaagttagtttgggttttttcgtagcacctcatgaaaatacccaaatgaccttttcaaccaacccagtaataaggacattaggaaatattggccttaagaggtgcaa

SEQ ID NO: 392 - DNA, 501 bp, Bos sp.
cacagaggagagataaggtgtgaataaggaaattttattatactgacatgtggtgaaaatctcactttacaaagtattacagttaataaatgtgtttgccatgatgacagatttcctcctaagtgatagaaaaagaaacactgaaaagttgaacacttgatgattcagaagtgataatctttggaaaaactgaccaccacattacatattttatttagcgatggagtttagacacttgcattgcaagacartgaagtacagtgtccaaaacaaggcacctagaactctcatcatactctgcaaaagacatcattcctaatacattttaagaaagacacaaatgaactaaaaagtatccaatgaggtgaaacctgaaagctgtgacagagaaaaacactgtcagaatggctgatctcctgcctgtagggcagtagaattagaagaagcaacttataggtcttcaaatatctaaaggatcaacatgcttatgagaaattagtg

SEQ ID NO: 393 - DNA, 501 bp, Bos sp.
attgtcctctccagcgattctgaaaatgtcaggtcttgtcacagaagcgtttggcatgtgtactgaattctgtagggaggggtccgtggtgaaccctgtgctaaggagtcttactggaaatcagtgctgggaaacatgacatcactttgtcgtgtggaaaacgtacttagatgtgtggcaggttcttctgaacctgtggttgtctatcctggctgccgatttaaaaccagcagaggttttaaaatgtagcraacttaggagatggccaaaaaaatttttttaattaaaaaaaagtcatggacttgtatcccacctgtgattaagtgaagcccaatgtctaggatgggacttgatttaactgtaaagtcttctcaggcagctttgataacactgcaagtgttgaggaccactcctctacactgaattgtccccaggcttttgcctttaggattttcagggtctgttttttggtggaacctcaagcagtgacgattccagaag

SEQ ID NO: 394 - DNA, 501 bp, Bos sp.
tgttatcataaagaactaagtttataactacttactcagacaaaggatgaaccctcatttaggtttcagttgattgcagagtaggccatcaataaaagaagacaaaataattcaacagcaggaaaaataaaattttatgcctctagcctcaaacttcctcattagtggaaattcttttaaaataccatgaagtattctcattgccttaaaaatgtaatttttaaagaatattgtgaggaagaaaaatgccrcaatagagctgagaaaggtttgtgtataattgtgacttttttcctgggcctcaggcccataaatgcctctccttcccagctagcacagtggtaaagaaccgcctgccaatacaggaggtgcaagtgacacgggttcgatccctaggttgggaagatctcctggaggaggaaacggccacctgctccagtgttgctgggaaaattccatacacagaggagcctggtgggctgcagtccatggggtcacaaa

SEQ ID NO: 395 - DNA, 501 bp, Bos sp.
taaccactcagacatagattggaggtttcaaagaccccctcattggacttgattaatttttttaaagcagctaacagaacttacagaaatatttactttgagatcactgaagtgaagtgaagtgaaagtcactcagtcacacccaactctttgcgaccccatggactatatagtacatggaattctttaggccagaatattgaagtaggtagcctttcccttctccaagggatcttcctaacatagggatygaacaggggtctcctgtatcgcaggcagattctttaccaggtgagccaccagggaaaccctttggagaagactataaaattatataatttaggaacaaatggaaaaggtgcatagggcaaggtatggtaaaacctactctgagcacaccactcttccaaatctccacatgtttaccaacccagaagctctccaagcctctccctttgggttatttatggtggtttcttatgtgtgtgtgtgtgttagtgg

SEQ ID NO: 396 - DNA, 501 bp, Bos sp.
gttcatgattgggagagtgagtgactttgtgagacaaatacttttttcctaaggtaagaatatgttgtcttattttcctgtagatgggagaagaactcacatttgaaattcttaatgtactggaattttctaggtaagctatctttttgatctgtatgtgaattttccagggctcttctttgactattcaactgagatttggctgtaaatgaaaacctaataacagaatcctgaaattctagttagcttcyatacacccttgcatctcagttcagttcttgcttctctaggcctcattataataattgttttaattggaatactcttctctgaggcttgctgctgctgctaagtcgcttcagtcgtgtccaactctgtgcgaccccatagacggaaggccaccaggctcccccgtccctgggattctccagacaagaacactggagtgggttgccatttccttctccaatgcatgaaagtgaaaagtgaaagggaagtcac

SEQ ID NO: 397 - DNA, 501 bp, Bos sp.
ggtggattctttaccagctgagccaccagggaagtcagcctatcccttctccaggggatcttcccaacccaggaatcaagcccgggtctcctgcattgcaggcagattctttaccaactgagctctcagggaagcccataaaggattaaggcatatattaataatactcaggaactatgcaaaaccaggaaataatgcctgtcctcaccagccactgcagaaaacctagtaactcacagagtgttgagtaragtactagagggattttgctatagtggtgggcaaagttagccttaaatgctgctctggctccacctaacaaaacttaaatgcaagacacaacaggatcaaataggtttcaagtaatgtaattacatataagaacaaagctcaaagtagtcacaggaataaaatgtatctaggacacagcaaagtgaaattcaaaatcaaaagtgtcacacaatcaaaaattattgagcctgcaaatttgcaagaaaatac

SEQ ID NO: 398 - DNA, 101 bp, Bos sp.
gtttgaattccgtttgtgcctattccccagccccaatccttaccgattggytattttctccttttgcacatgtcccctgcctgctctcactacccaaagag

SEQ ID NO: 399 - DNA, 101 bp, Bos sp.
ttgtgggtatttgcctcattccatccccaagctttgcagctagacagtgakattcaaaactacgttctaaggcgtgtcctgtaatggagtcattggttgac

SEQ ID NO: 400 - DNA, 501 bp, Bos sp.
acagggaatttgaggatacaaatactcttagcttgatctagatacgggttccagatggactagtccctcaaaatcttcatcctatcaggagcgggatagctggaaaaaggccagatgaggacctctaaagcacaaggcccagactagggttcccgcctggataactctaaggagagagtaactctctagtcagtcctggcaggtatttccaggacgccatccctccctagtcctcttcagatcttcacacwctctctaaactatcctagacactgccctggcttcactcaaatctctcttccagtctaaaccattttatgggtgccagtttgtctactagatattttcttgcctatacttccctgcaaacttaaacagcaagcatcgattccaggatatcccaaggactacgttaattaattcaaccaatcaataaatattaattgagcgccttttatgtactagtagttttcagttagagttacagtggtgaataaagca

SEQ ID NO: 401 - DNA, 501 bp, Bos sp.
gttagaagtaacccagaggtaatggcttgcacacacaggaatgcccgcctcctcaggttctttctcctctgccttaggaaagaggacctgctcagagaagtctgagctcaacaaccttttctacttgatacaatccatctcctcattctgagttcagctgttgtgattgcatccttatatactcattcatttcctttgctcccaactttacattcagtcagcctcacagaaatccactaaacttaataaaygctgcctacaggctctatgttatctttgagtgatatgatttgtgcaaatttttacgtaagagaattccctttccttccaatttctattaggtctgttaatgtgtctaaaacatttcattagatgactgtttctatttttccttttatataaaacaaattgtccttgccaggttaaggaatcaaggtgaatcctttataactgttaatacaaaacacagcaccagaggaaggccccaaaaacctagaaagg

SEQ ID NO: 402 - DNA, 501 bp, Bos sp.
atgcatgaaagtgaaaagtgaaagtgaagtcgctcagtcgtgtccgactcttagcgactccatggactgcagcctaccaggctcctccatccatgggatttttccaggaaagagtatattcttcctcaaaagcaagacctaaccacagctgcaaatgtgttaagagaagatgtgaagtagtggttaaaatcagaacctggattcaggacatttcatcccagctctacctaccactttctaactgcatggcsttgagcaagttttttaaaaccacactgcccttcagtctctttgcctgcaacatggagttaaatgaagttctttggattgttgattatatgaggcaaagcacataaaagactacctgataaagaaatgctaagtgcagagtcttatttccatgtgagaagtcttattacttccctatttctgtagatcagacgtcaaagccacatttacacatccaggaattacaatccagacctgaacacagttcttttt

SEQ ID NO: 403 - DNA, 501 bp, Bos sp.
tttagtcatactctaatagtatgacaaaagtactctaatccattgagtagacagaatgcagagtattcaatagttttgaggaagtgtttctattccacattagatttctcaaattactgagcttttcatgtaatctcttatcacaaaaaagttacttactattgttgcatttataatatgtgtttaattgagtggggatacagaatagcttctccaggtttaagattgccaactctgcagaactagtatcytgggcacctgttattaagatgacatttaggagattaagttttttttattaattaggtttttattaaatctatccatttgagtctctaccccttcaccaattaataagtaatctggagaatccctttcagaaggtaaataaaaacaggaataatcaagagtctgcagtatctccacacttaggtttcaatgaaaatctaaaaggagttgaatttacatttgaaatagacatattttagggtctcctcctaa

SEQ ID NO: 404 - DNA, 501 bp, Bos sp.
tgaaaattcttcccattttgacataaatcttgaaaataataatttactgtttgtaaccaagtcagctaaaacctaattggctcaaactctataagtcttgaggtattttcattgtctttcctttgtactgccttaactcagatttaatatacaggtgaagatatttcacctgtgtttgccaatctattccaagatgccaattataacataaaaaacacaatgagtctctatgcatgaagtagataaggttkataatgtgccaggcatttcatcatttatgggttatagatggagattttcattaagcattattgaaattaccataacatacatgagtacatattccaaaaaagaatttctattagcaatgtagagaaatggtacctgttgataaaacaaacatagtatttgttcacttggtgctttcaattacttaaacaaactcaaaaagaggaggaaaaaaatgaaaagtattttaattggaaacatcaaacaatttga

SEQ ID NO: 405 - DNA, 501 bp, Bos sp.
cattaaacaaaagtgtaatgtgttgagtaacattctcgtacatatcatcacctaatgttgatttttgatgaaatttagggattgctcatggatttgaacagaaagggaaccctttggaactgactggcagagctagtatgagaattgatcaacaggaggttctgacccaagatactatagaaagggttggagagaattgtataaataattttctggtttaaatctatcacagtgctatcactgctttcctrgtagcaaatgagtttgatttgattcagtcaaaatttctggtataatacaaatgaacatttataaaccaaatgcaaaaaagcctcagtaataggaatgagaattagtttgagcagtagagaagtattctcagtgctgagaggctatgatttcgtgaaattaaagatctgattttagtgcatgcaaaataggcagtttaaatataggtcaccttttctacccagataaattacttctggtaaacataagtat

SEQ ID NO: 406 - DNA, 501 bp, Bos sp.
ttctgatacttaatggccccttggtccctatcatcaccaattagactacaagaagagtcaagtgtggaaagtctcttaacatataaaatgctatttccctgatttcttaggcttatttggcataaactgaaattttgcccatcacagaaataaaaatgtctagaaaggtccacacacatagatcttttagtgtctaaaataattgcatccttttgttgtgtttcctggaacagctaagctttacacttacratctttggtttctttgagctcttggacctttagaagtgaacatgcttgggcaggaataatcaacaagccatgtcagagaagaaaagagcaggacaagatgagaaggccttttctttatatgcttacatcccaaccattgtcctctgtgatctttcatctgtgtttcaaccatggggcgactgctgataaattctaacagagtcctctacttggataaccagctccagagaaaatccaggttgtttaaaat

SEQ ID NO: 407 - DNA, 501 bp, Bos sp.
atacatgagctatttcagaggtggaaatggcaatgtttgatgactgagcatggcagcagtgggaactaaagggtccaaggaggacaaccaaattaggtgtaaagatcattactaatgatccctcagacctctctgataacttggaaaggggtcagctcccatacacttgatcatttttactattcagtttatctctgtttcaatagggatttactcatactctatacatagctgccaaactattcacttcrgggatgactctttttgtctaacaccatagaatcatcagaagaagacataaaagtgatccttatttgtaggtttaagaaaaaagatttgctgatatatttctatctgttttgattaaatactccaaaactgtttacatacacattttaaaaggtgattttgtatctccttttctatatgtcaaataaatatttggtttcagagataagttttagttataatttacttgcatgttttctatgaacactgaaa

SEQ ID NO: 408 - DNA, 501 bp, Bos sp.
tgaagctcctttcagcaggacttcaacctaatagcaaataatcacatcccttctggtgatgtttatgaactagagaatggttccaattggtcagtttcatgcaggtctgaatatacacattttgattgaatttgctcaaaagaagatagctgcactgttaatcatatttattagttgatcttaagaattcatgcatttaattgttctagaattagagataaaccttggaattatgactgtgagaaatggcyaagagtttcattggggatgacagaaggcaatgctgagcaagaaggaggtttgaaatcctgcattaattctagagttcatcaacctatgactatggaaatctcgatatatttgaattgcaaaaatttataaaaaactcttaaatactttttgtccttctgttttctccttcaatataagcctacaaaattataaggtacttaagtgttgggaccatgtctctgaatctttaataacaaacacactctcata

SEQ ID NO: 409 - DNA, 501 bp, Bos sp.
atagatgggaccccaaaacagaacagacatagtttggagggtggaggggaacagcgaaatccagataaagcctggagctgaatttaaagcaaggcgcctgtgttcatttcttcattttggcaagatggcaaccttaggaagagctggctgagggcaggtgcaagttctccatgctgtttttgtcacttttcgttccatctaaaatcatcccaaaatcaaatgttagaatttgtgatggtatggggaaatayagtaagtccccacttatgagtgagttcccttccaaaagcacattcataagtcccattttttcgtaattccaacaaagttagcctagtacgcaacttttacagataatgccagacaggtgaattagcttatgtgattggacatgtgaacacaagtttgaatcttttttgtttgtttgttttttacttatttatttctggctgagctgggtctttgttgctgcacttgggctttcctccagttgtggcaagc

SEQ ID NO: 410 - DNA, 501 bp, Bos sp.
acaggcccctccctcccacctgcccctcccttccagccacccctcttaggctgtcacggagccccagcctgggcttctctgtgtcatgcggcaaattctcactggctggctgttttacagatagcagtgtgtatgtgtcatcgttactctctcaaatcggaccaaaatttattcagctattcccctgttgatgaacaattaaatactttctagttttataaacactgtagtacaaacatctccatatggaytgattgtgagcatgtgtaaagtatattgataagacagatttttagatggtcaaaggagattctaatttgaggtttgagagacagttccaagtttcctctctccttccttccttccttcccctctcattcttgctacagttttgagaatactgtgtattatcacttgttttcatgcttgtcaattttagtaggtgaaaaataatttactgattatttaatctgaagattttaaattgtggttcaggttgta

SEQ ID NO: 411 - DNA, 501 bp, Bos sp.
gaatatttgcaaccacgtaaaattttgtataaatcaattatataatgtgtgattctaatatcattttccttttatcttatttgctaacttcccactttccagatattcagagggtaaagcatgctgattaagaatctagtctctgaactcaactcccagagtccagattccagctctcctctgagctctgtgacttaggacaaattatttaatctctgtgcacctcagtttcctcatatgtaaaatgggamtgatgacacctccatcataggatattgaacattaaaacaagtcaacccccttaaacatgtcaaagaatgtcggatacacagtagaaggcacaaaatttttagccattgttaaatatatgtgcttattttctaaaaaatatgtcatattctaggcacttgttacagacagcaaaactttgtggaaactgcttgtagtctttgtgtaaatctaattcatccattttaaagctcaagtgtaatccatagcttg

SEQ ID NO: 412 - DNA, 501 bp, Bos sp.
gagttggacacaactgagagacttcactttcaagcttttaaaattatttgatagggactggtgtttttaattctgctttgaggcaccctgaatattctcacctataaattcctggaagtagtcagattagcaaggaaacattcctttgtaaatcaccacatttggtggtacttatcctgtggaatattagccaatacactgagtgctatttttactagcattaaattcatacatattatttcaccactggygctagtggtaaagaatctgcctgataacacaggagatgcaagtgatgcaggttcgatctctgtgtcaggaggatcccctgaggaaggaaatagcaacccactccagtattcttgcccagaaaatttcttaaatagagaagcctggtgggatatagtccacagggttgcaaagagtcagacacgactgagcacacacacatatttcaccagaacaatgaaaaataattatttctttacttgtatttatcct

SEQ ID NO: 413 - DNA, 501 bp, Bos sp.
ttgctgaaagaggagttagctggcatattaatatattattccagacaacagaatgtgagtgaataaactagaagatttaaaatgagagtgcagaggagacaatgcatatgaaagaaactggagatttagaagcatggaaatggcatgacactttgaatgtggaggaagaatggagagaagttaaataaatctgtatctgtttattgaaactccttaagagaaaaggaatgattagcaaattactaagaggyggcttttctctttgctagatttaaccaggaatttgtgtgtgtgtttgtatgtgtgcactgtgttgtgcgtttcattaatattcctcttatttttattatttatccttctcattcactgttatgctgaacatagccagaaaatgaggtcaactcaacatttgcttttgctcaaggctacatcaggcaaatgaattctttgtccaattcagaagagaaataaatcaattacccttgctgaagggtggctatc

SEQ ID NO: 414 - DNA, 501 bp, Bos sp.
aaaggaatgattagcaaattactaagaggcggcttttctctttgctagatttaaccaggaatttgtgtgtgtgtttgtatgtgtgcactgtgttgtgcgtttcattaatattcctcttatttttattatttatccttctcattcactgttatgctgaacatagccagaaaatgaggtcaactcaacatttgcttttgctcaaggctacatcaggcaaatgaattctttgtccaattcagaagagaaataartcaattacccttgctgaagggtggctatcttgagtgcttttaggaaaaactcaggtcattctaaagaaatgtctgaaatatctgcaagagttaagagcaagataagcactaatttaccatctccttcatccccataaggaggtacttaaaagaggacaaaatgcatcactaggtattgtcagggtcaaactaagacttcagtatttctttgaataaaagtactatgctccactgcctaagatgaagagtg

SEQ ID NO: 415 - DNA, 501 bp, Bos sp.
ctacaatccatgggggtcgcgaagagtaggacatgattcagtgactgagcacatgcacatacaatattatatatttatctttataccagtaagtcataaatgtaacctgtaacatttgttgtagccctgggtaagctaagatgaattctttgaggagtccagttatctgaagttcaaggcacacgaagacattgttctaacactgtcaggaatcacagatgtgaagcaattagttctatcttgggaagtargaaaggctttgcagattgttgttgctgtttaggctttgcagagctgatatttacatcagttatttgaggataaatatgttttctacaggtgaagatagtgggaagggcatttctgggagaaaaagcagcataaaccaaggaatagggttatggaaagagggtgttggatcttggcagtggtcaataaccaataatgcctttctcagtataaaatcataagggaaaattctgttacttctattgctaaatc

SEQ ID NO: 416 - DNA, 501 bp, Bos sp.
attcttctttggtcatgatgctgagtgtggcctgaagatgatggaaatagtgaagaacggatctgaaaactgtaacagatccaagttgcatggtcaactaaaaagtaagaagtagagcttttcttcagctacctaatgctgtgttatgctgtatatgctttcctaattaatctcttacaagacttgatggtttccaaaatcccatctgataactgctctgtcagtgacagacagtatctttggataagtgmaatggcctattagccaaattgaatgaaagtgtgacagtttattaataatgacatttaaatgatatttccactcagagaactttgttgcctgtatcaggatgtaggttatatgaactagcaagtaatcttaaattctaagtggcataaaactacccagattcatttcctgctcctactacatatctccagagctgagatggagggaatgagtttgggcagggggcgagaatttgctcattgttgttattac

SEQ ID NO: 417 - DNA, 501 bp, Bos sp.
ctgaaactttgccaggccttggcccgcaaacgtcttccaccctacccagcgctgacagacagcacaatccggagcccataaagattagaaatgttgtattagtcagtgacccttcccaattaaaatacttagttcagggttcttcacacaatgcttaaagtactctctgttcaacaaaggcttgttgactgaatttacagcctgtgctgtaacatgaactgtagaccgaagtccaaattacaacacatgasctctatggcaagaaagagtgaaaaaataaagcaaccctggacacacgccagatgacggccgggcccatgagaaactccagagagagaaaaacgcactaaacagaaatagcagtgcaggcaccacatccttgctctctgatcctttgtgaactatgatcgctccccttcacaaaattataagcctctcgagagcagggtacgatgaagtgtcaagtgctgggtgcccacctttcctgtcagtccagtcatc

SEQ ID NO: 418 - DNA, 501 bp, Bos sp.
gtaggtgtccaaaactatattattgattgttttatatgtgagttggagaaagatgcataaaaatgtctaagcatgctagaattctctttatttattttttggctgcaccactcagcttccaggatcttagatccctgaccaggggttgagcccaggccttcaccagtgaacgtggtgaaagcacagagtccttgggccaccagggaactatctagaattcttcatatagccatgatggagtaactggtatkagacttaccctcttatcatgaagtactatgagtaagtgtgtcacttagtcatgtcttactctttgtgaccccgtggactgtagcccaccaggctcctttgtccagagaattctccaggcaagaatactggagtgggtagctattcccttctccagtggatcttcccaacccacggatcaaacccaggtctcccacattgcagatggattctttactatctgagccaccaggaaagcccgagaatactgga

SEQ ID NO: 419 - DNA, 501 bp, Bos sp.
ctccaataatgtttattcttcaagttccagaagggccttttttttaaaaaagccatttcactttattagaaatcaacggtgccctgtgggccactaggctggtctctaaatggaacttcagggcgtctttacgtttagcaatttatcaaggactattgaagactagtgctagagatgtcgcactgagcaaacaaagcctcatagaaacaaagctacatagttatcttctgggagtttttgtgtgttctcayggtaacatctcaggtttttgaagtgtgggttgtcccacactatcctaaagtacaaaagtcatgaggacaaaaattcccttctgctgttgcagctgtagggtcacctagtgccttatttaatcagctgataaaccagcatattcctctccagccataaagcaagataagagctcagaagtcatcattcccctcccttgcttctctctctacacatgtacctgtatctattatatacttaactcagagtctg

SEQ ID NO: 420 - DNA, 501 bp, Bos sp.
agggaaattgggaagattaaggatagctttttaatcaagactcctaacatttcctctcaaggccaggcacatagcaaccaacaagcaatcatagcaacagtgaatgataaacatctatggaaaataacaaaacaaagaggcatcaagctttagtctagattatgttatgattctttatggacagttcagaagccatcaaagcagtatttccttcaaagctgagaacagaagcacgatgttggcacacaccrtttatttcatcgtaaatacacttgttaagtaccaggttcgaatctttttgcttctctgaaaatctggataagtcaccaaattattttgaaattgaagggtatagagagaaggtaactaatatactaaaatacctgagtacaatggaatgatttttgcattatagagaaaaagcacttacgttaccttagtgaaaagttgccagatagtgactactcagtttccagaatgctgtcacctgagcctgattta

SEQ ID NO: 421 - DNA, 501 bp, Bos sp.; identical to SEQ ID NO: 213

SEQ ID NO: 422 - DNA, 501 bp, Bos sp.
aggagctctccgcttccccacgtcctgcctgtcatcttctcagaaagggcttcccatccttgacttgtccgtcttatggctctgtccatccagaagccacttttctgatccccaagcccttgtaatcaaccttcatctgccctcaggtatcagcacgatccatctttttacatcgtctatcatattcaaatgatcacaaacataccagcaaaatgggttaatagctctgactgcttattagtataaaacgytaatgcggagactacatgagaagaagagaggccaagttcttaatgccaaagggggattaatgtatgaatttctgcctatcttctcatttgctttctcgagagtcatcaccatgaattacaaccactctccttcctgactcagtaccctctagggcatctcttcatcacaggagcctcctttcttatagctttgtcttcattactgccccagagaggaacaacaggaagaagaaagttaatgcaacttctt

SEQ ID NO: 423 - DNA, 501 bp, Bos sp.
tccaaagaacacccagggccaatttcctttagaatggactggttggatctccttgcagtccaagggcctctcaagagtgttctccaacaccacagttcaaaagcatcaattcttcagcactcagctttcttcccagtccaactctcacatccatacctgaccactggaaaaaccatagcattgaataagtaagtcatagcaaataaaaactttgtagtgattctgttttttcccatcagaatgcttttttwaatcttggtcagaatgttcaaaagcatctgaggcagagttcattaaaaacatttttgtaaatgcttgtcattttgaagcagtacagaaagtttaaattagtataaattttgtcagaatttatagctataactcacataagactgtttatccatttcccctttttgtttagcagtgctattaatggtttcgaaaaataacatattctctgtcataatgttatcttatgttttagtagatttttctgatggc

SEQ ID NO: 424 - DNA, 501 bp, Bos sp.
gaagcccaatctttgtcataccctctataatttcacttctgtatgtctgtttacatgtctatacagttatttgcatggctgtctcttgaacatggaagaatgccatcaatgttggcatctttaatagcaggggtcagcaaacattctgtgcaaaggaccagggaataatattttaggattgtagaccatatggtatctgttgcaactactcagtctgccattgtagcaaattgaaagcaatcatagacaayatgtaaatggatggggatggctaagtccctataaaactttatttacaaaaacatacggcaggcaggatttggcctatggaccataatttgctaacctctgtaacagagaatctataatatccttaatattctgaaaaaaaaatcattaatgaataaaaaaacatatgaatgaactacaacaaacaattccttttttttcccctcaactttaagccacaaattaatcctggaataagtaagcattagacaa

SEQ ID NO: 425 - DNA, 101 bp, Bos sp.
gcctaagtttccttttgaccatcacctcccagtaacaatttactgtcaatmtccatttcagaatggtcaaggcttctgttgaaaagataacatgaccaaga

SEQ ID NO: 426 - DNA, 101 bp, Bos sp.
tctgcacttcactcggtaatattagcaaatctccaaatgttagccacattygtttgtttcccttgtatgttgtttattcatgatacttcaatgctgtaact

SEQ ID NO: 427 - skipped

SEQ ID NO: 428 - DNA, 501 bp, Bos sp.; identical to SEQ ID NO: 176

SEQ ID NO: 429 - DNA, 501 bp, Bos sp.
acaatttaggaaaaattgtagaatacctaaaagtatcaatcagtaaaagccattcataacagaagctatgagatgaaggcatgaagtttaactgaagacagtaaaacaaaacaagccaagacagaagggtagatttaataaagataaaagcagtatgtaatcaactataaataagaaaaatggccgaactaataaataaaccaaacaccaaatctctgagcaaaccaataaaccagaaatgcagaagtcgraagcacaaattcataaaataataaatgatggaggaaaaatcatgatatttggaggaaattaaaagattgacaagaggctatgctgttcaactatgcaaaagtaattgaagacccagtgaaaaaaggaatatttttaaaaattttcaatacattaaattaattccaacacaaacagaatatttatagaccattcactatggaaaaactgagttgtgaaaatgctaatcctatgtcaaaaatctaactcaga

SEQ ID NO: 430 - DNA, 501 bp, Bos sp.
ctagaaccagctgtatgtgtaggggtggtagggagatgttcagagaaacttaaaaaccactggattctgtgccaggaatttgcaattgtagtaggtgtgaatttactgatgacccattgcctttttttacagcagtgtttctccattttttaactcattcacaattggtaattaaaaatctcatcctccagtgtcagtataacccttactccatcacccagactgaaaaccactaataatcatgaaacatragtctctctagctccattattaacaccaatataatatgaattttaaacatttaactcttcatttgcaggcatcacagactccaccttttacctggttacccaaaaggcaaaaatacacccatctatggacagagtgttaaagaaacacttgtctttgaaaaatggccaattaaccttctagagcagaaatcctttcttagaagtaaaatcatctaaaaggaaaaattcattctatttaaatccaattctg

SEQ ID NO: 431 - DNA, 501 bp, Bos sp.
  polymorphism (251)..(251)
  misc_feature (389)..(501): Nucleotide unclear from position 389 to 501
atgaaactattcttcccagaatgagtaatattgttcccttcaactccatgcctttgcaaaattctcttatttttaaagaatgctcttccctgtttgatctgcttagccaatacctactcattttttaagaccctgtgttatgctttctttgatcactcccaccttccccaagcttccttcccatgagttgactatgttcttgtgtcactatctctaacacatatccttatcaaatactgtaatacgattaygtactgacatcttgtctcccccactgtgacaccgagaagggcctggtgggactcctgggcacaaagcctttctgtgcccatgaccttccctgagttccaagggggaagatacaaccagttgttagttagagaaaggannnnnnnnnnnnnnnnnnnnnnnnnnnnnnnnnnnnnnnnnnnnnnnnnnnnnnnnnnnnnnnnnnnnnnnnnnnnnnnnnnnnnnnnnnnnnnnnnnnnnnnnnnnnnnnnn

SEQ ID NO: 432 - DNA, 501 bp, Bos sp.
tcctctgctttctgctaaatttccttgctcaccagcatgtaccatttcccaaggtctgcttcttaggacttctcaaatccctggtgctgccccagaaatgtgacagtatttgacttctccagaatagtaaccaatctctgctgcacccttaggtttcccagacacttctataatgtgtgcttcatccaagttttctgactattgtattccaaacctccatcatgttgaagtcaccacttatatcacttctrtgataatcattgcaatatgtctcaatttctcttcaacataggacctgtaactcagctgctgggagtgtggttggcagacattatttagttgtcagtcccaattcagctgcctcttggggtggcactcatgtcatgatttgttgacaggaggggtatgaggcctagctcagaacaaccctgaaagtcagctctagttccaaagtgttccatggggtaggctaagtctgtaattgaacctcagttacacttg

SEQ ID NO: 433 - DNA, 501 bp, Bos sp.
gagaatgaaagagaagttgatgaatcataccagttatagaaaattgctaatttaataagcatctcattagaatttgctatggtgactctgaagtttaatgagcagaaattttccctctaatttttctgaagcagtgagatgccagtgaactgaattgatgctataataatagtactttctcctctactttcttcttcatgagaaatcagcccacatatcatgcaattcacactcacatatatcagttgaasgagtgtgagaaatcagaaatcatataatttacagtgtttaaatacattacacagcaggtacttcaatatcctggttgtagccttctggtaactagttcatgtgtatactatgcacactcatagacagtatgtttgtctaagatagtaaattaataataaaagcaataactactgcaaagacccttaatacacacagtacatacttttaaaaattctctttaacataattccttgtactatcatctagagg

SEQ ID NO: 434 - DNA, 501 bp, Bos sp.
caatacttgtatattaatgtctgagaaatactgttgaattgtttcccccagatctaaaaaaatttcaataaaattcataaacgtatacataaacacttacacacatagacattaccaaaaccacaagaaaaacttttattaatctaatcttaggtttacttttaaaaaacctactataattattttaccttttacccattgtaggaataaagtgctatatatgcaaataaagagatgtgttgcattgctamgttcttgtaaaagaaactaagaatgtcattggttttaccacaaatggtagtcctttctagtattactcctatagaaaaacataccacattttttaaaaatcctacattatagtatcattatttacatctgccacaattatatctaccattatttaactgatttatatgtgagacacattcatttatgcaagtttccattaaaaggtcagggatagggtcaagaactctaattctgacttaggaacaatcc

SEQ ID NO: 435 - DNA, 101 bp, Bos sp.
aaagatcacacactgagaatctctacacaatctaggcacagataatctaayactaaactactgtgaaattctgcagtactgaagtactgtatgttgccctg

SEQ ID NO: 436 - DNA, 501 bp, Bos sp.
gcagcttgggcccggcatggagtggttctcctgggacaccgggactggctggattctctcctaactcagcagaagtgccagggccatgccagtcacagggtaaagtggctggggtgtgagccctacacagagagggtctgtaaaacccttcttactgactcaagccctgactcaggcattctaggatttcaggactcacccaaacctgattaaaggtgtccagagggcctggggttaacactgagttgttytttaagtacaagattatggtttccaataaagtggatttgtggtacctgaggtgattttgtggaagaaaaaaaggaagattaaaaagtctgtgtcaaagtagtattttgattagaccagaagcataattttagaaaatggaaaatagtagggatgccataggaaatgtgcttggggcctgccctccccagaggaatggagtcaataaatcatctcccgccagtcccaagttttcaagtgtgatgttttcga

SEQ ID NO: 437 - DNA, 501 bp, Bos sp.
aggggctggcacagcctctgaggctgttgcaaagtctcagctaccaccaccaccacccccgccttgtcagtcttatataacaccgtccatgccacacaccgccaccttgtcccgctgagtcagtgctcctgtgctgccccccaggtcctgtgtggcaagaatcccctgaagcccagcggccccctgggaaggtgcgcagagcaggctccgggttacagatgcaacttccctcccagaaatgttccctactytaatcacttttttaaacttcacaaacacaatctctgcaccgtgatcaattatttagcagaaaatgatgcatcgtgttagcaactagatggcatttaatatgcccccagaattctaatgacatgccgtcttcagaggcctaatgcaaagtttcccctgcccatgtttttgaagacttcccagagtggaaaagagccaagatctatatgctctcagttgatgtcggatgtaggtggcccctggaatgtaatc

SEQ ID NO: 438 - DNA, 501 bp, Bos sp.
ctgtgttaaaacttacatatagtaggcattcaatgtttttattactatcattattttacatgtcaataatgatataataaaatgtaattttattactatataataatgaatgagataacataacagtaataaaacctgtttctatttcaaatatttttatcaacatacaattaagggaacccttgtcaattaactcattaacagatattaagtaactatatgttataggcagtgtttaagtcttgagttaytcagtagaactgatctttaatatcatgggtatttcacactgataaaagtaaccatacataaatagcaataaaacaaataagcaaaaaatagataagaaaatattggaaaaccataagagtgcttagaaatatactttacacagaagtgacaatgtgaactaatatctgcatgtggaaaaagatcaagttaggtaaatcttttgacactggataaatagttgactgaaaacactaatatatttctcaactt

SEQ ID NO: 439 - DNA, 501 bp, Bos sp.
tcaattattgtcttgtaatagacaaagaatattactggttgattcttaaagataactgtccactgaactgaactgtactatgattcaaatgattttttaaaacaatgtatttataaagaaatatattctgaactatgtacaaagttatttttgtgtactattatgatatgtatatattttcagttccatgtgtttacagtttaatacatcaaggaacaaccataatgataatagtttatatttagcaagtrtttactatgggccacacacagttcttaatgatttccgtatattgactgaattcctacaatattcctatgagatatactattattattctcatttaatatatcaaggaaatggaccacagtgaattttaagtaatttgctcaagctaatgagtggtggaatcagagtgtgaaatcaggcatatagttccagagtttttgtttttcagttcttttcagttcagtcgctcagtcatgtccaactctttgcgac

SEQ ID NO: 440 - DNA, 501 bp, Bos sp.
gtagtaatctctgctcacttgttagatattaccaatgagataaatacagtggattgcacttatcaattattcagcagtgtgtaaattcagctacttagaaagttgtcaaaatattctcagaatagcagcaattcttaaatgaactatagatacatagatcttagaacatgtaccatgattagccaggatagcaggcaaaaagtagagtttctttgttttcttcttttttttttttctttgttttctgacartagctctcgaagtcaattttagctggctctaaggtctagtttggagagagaaagaagaaaaactaagaaaagagcagaagctggcataaatgtaacaattagaagtaactataaatagtggaaagctattcactgaaagcagcagtaaatgacagagaacaggaacagaagtgagggagaagagaagaaagaacactgaggcaactgatcttttcagtttaatagcctaaaaagtaccctagtatttgag

SEQ ID NO: 441 - DNA, 501 bp, Bos sp.
ttatgacttcatggactatagagtccatggaattctccaggccagaatactggagtgggtagcctatcttttctccaatggatcttcctgacccaggaactgaaccagagtctcctgcattgcaggcagattctttaccacctgagctatcagggaagaattcaatatcggcatttttttttatatcagcactttgaaactggaatttcagtgtcttttgactttcatcattttagatgagattagggctmagttttattgtagttcctttgacaggaatatatttctttttctctgatacatactttttcctctgtgaattttagcagttttactgtcatgtgcctagaggtagtttctttgtatttattctgttttggattcataatttactttgaatattaggataatctccttcattaattttgaaaaatgattggctgctcttttcaaatattgttccgtctccttttctctctcctttccaaggggaaccctatt

SEQ ID NO: 442 - DNA, 501 bp, Bos sp.
taattatatgttatttgttgatagcttctcataaagaaataattttaaagaaatgataaccctctgtcaggatctaaaagtgatttcaggattccagtgcctctgaactgacagcaattgttgcacaaggtgattgaggtggaaaatggaagacaagagctccatcttctctgtctctgatacatcttagaagcctatttcttcttaactaaatatatgatctttttgttatgtttacctttagcctacartgtagcttgttttacagaaaaagtatctcaaatagcatcaactctatttttggaaacataagcattcttttaaatttaagtagtctttttcaaggttacttttttcccatcacagatcatttccaaccttcccattgttttttcattatcaacatatattctgtttttctgaacctacacaagctttatcattgcatgttttaagaagcattttcttaaagtccttagattattctgtctatccatttct

SEQ ID NO: 443 - DNA, 501 bp, Bos sp.
gcccctttgtgtaacaagctttcaaaagaggcaaaacgtgggacttcaggattcactaaccgatcataagtgtgaccccaagggttgtgtgaccagcagaacccaatgaagcttcaaccttagaatatagccatcccatgaggttcatgtttactgtgcttccctggaagagaaagaaaaaaaatcatcataattttcatttgtatctgtcctgcttgaaaaaaaaaaagatgtgagtagcttagagaaayaggtataatagggatcattaaaaaacagataattatataaaaaaaaaacactacaaggaaaaataacaacctaagataaagccacagctaagattactacacaaaaatggcaacttatagaaaatgctagtattcaaaacagcacagtacatctagaacttcctagtagcccaaacaaaaataaaacacaagttaccaaatttacagggtacccaagacaataataaactttggctcagaaaaagcacag

SEQ ID NO: 444 - DNA, 501 bp, Bos sp.
gtttgcagaatcttattttataaaagcaattcaagtcagtggaactgaacaaggaaaaaagaatggagaacaaagaattccattcacatatttataaaactagagctatatctgttatatctctgaaaggcagaatgatatagcaattattacaaacacagttgtttgaatatatactgacagacattccactcctcaaaattaaagaatcattttatcttcagggtttcaattttaatttgagctaaatscaaatcgaactaaccatggatgtttattccccttctttttggaccagaaaacaagaaacaaaaatatgtgtttttcgactgatcctcacttctccacatgaggattctgcctgcagaccctgttgcagaagcttggatacacatggtgatgaaaggtcattttacaacttcacatgttccagatggagactcttgagaaagaatctcttttctggtaaaagccagaaaaagaaacttcacaccatttaac

SEQ ID NO: 445 - DNA, 501 bp, Bos sp.
catttgatttctgcattgtatacagtgtgtgaaaactatgtgatatatagtgaacttcattattaatttccttgtccatagttacaggttaaaacagccttgtgttgacaacataacaacaccaaaattaaaagactatttcatcatatttatacttttacattagtacagattttggaagatgagttactgttgaataacaaatcagagcctcgctctcaatttttcctcacgatagtgatccatttctwtttaaaactctcaatttcatatgatttaatttaacttgattataaaggttaagtttagggttataaaaagtcattttctagacttaactgaatttagtttgaaaatcccagaattcgatttattcaatgtgaataaaatattcacatatgatttcagagcattattataattccaattttaattttaacttctttgttaaggtactagctccaatgtagtaaaatgcatttgatagtaacactcaaaata

SEQ ID NO: 446 - DNA, 501 bp, Bos sp.
catgagcataattgttggatgctattttattacatatgatcatacctgaattttatttgtgtcaatcaagtgctgtgccatggattttaggataattgcaaagaagaaccaggaatgctgttaggaaaagaaaagacaatcagaaatttattatcttacagcaaagtaatgataattctgttctttacaacatgcgatactataaaatctttatcttggaatgtattctttgaaattaaatgcatcagagmaataatatagtctccatgatgttaggatcatccttagcaaaattctaatgggaaatgtaaataccagatatttctgtttcccagtcatctctaagactgtataacacaagaaactggcttatttgacatggctgattagacagtcgtcttaggaaatacttattcatggggtgttctacctgttttccttaaacaaaactaaatgttgtagcaggcccacccctcacattacgatgggtagaggcgagta

SEQ ID NO: 447 - DNA, 501 bp, Bos sp.
cctttccaagtactggggaatgtttaagagcacacataaacacatagccatcaaactgatttgaattggacaaaataaacaaaatctggtctaaatgggagtttgttcagttatgtctctcagttttcaaaaagccttgaaagaaaaattcacagcttgaatgtctcaaaagaatcttccagggggttaacagatttgtttattaataaaagctaaatcagaaggaacttaaattacctctgctttcacamtattttaaagaggagattttcatactggttagggactgccctaaacaattctctgaaatgggcaatatcagtttgtaaatgtaaagattcattggccactgaaactcagagactgtcaaatagcttccattctctcatttcacagacaggaagccaacacaaaggagaaaagaagcaacctgctccaagtgtataacttggtaatagaattcagattagaacccatgcctttgagagcaaaagttttttt

SEQ ID NO: 448 - DNA, 501 bp, Bos sp.
atactttcagagcctccatctcagggcctcggatagtagcatcagatgtttgtagcaggaagtcaaatttaatcggtttctctgtgacagatttaaagtccatcaggtcctggggaaagatcatctgaagagccagaagatgagctcatttgcctctcctcaaagacaagttagtgaaaaaattcaacagaggagtgtttagcaggtggaagctcataaatctgtcagcaaactttactgaccatatacargaaattaggttatgcttttttttcccttacctccagtgtcattttgaattatgtactctgcattatggagagaccagcttcttcctggctgctagccaggcatttggaagacaggaattggttttatttttctatcaacctgtttctgattcagattttagggtgacatatagtcagtatcaggttaaaaaaataatctgttgtaggtcaaccaacccactttcaattatactcaacggcatataattgg

SEQ ID NO: 449 - DNA, 501 bp, Bos sp.
tgtaagcttctgtttggtgcctctctttcttgacttctaatagcctacccctgaagctcttttaggagtgtttattcagaatcaagaccatgcaattgagttctgaccaaatcagtgtaggtggaagtgatgtaaatggttttgagagctggttatttaaaaatagttaaatgttgccttttggtaatgcatgatagaaggagctcagaattctgagtcactgagaaaactatccccaatttataaacaayctctgtaacccagaaataattctctatttattgaaatcactgagattttaaagtttttttttggttacttaatggactggttagtctagtccattttgactaacacagcatccaaacttcgctaatgtacaatttgtcaatcaacagaagacttaaataaatatttgttgcataataaacattatttgcattataaaattcataaaatataaaagacaaattaagagtttaaaaaaatagactttcctcc

SEQ ID NO: 450 - DNA, 501 bp, Bos sp.
  polymorphism (25)..(251)
  misc_feature (297)..(346): Nucleotides unclear from position 297 to 346
agtagatacacaagtcactggtacacaacacatgttcttactgataagtagcatatattggcttaaagtaggaagacctcagtaagaaattaaagaataagtgacaaagcaaagccatgacatgagggaaaatattgtctatttctaacacaagaacaacagttccagtcaaaaagtctagagtcaaataaacgtgcaatcacacaaacactgtaattctttcatgtttcaatatctacttttttataatkaatcggttaccaagaagtccttaactgaatgatgaaaccaacttannnnnnnnnnnnnnnnnnnnnnnnnnnnnnnnnnnnnnnnnnnnnnnnnncaattttatgaagtattgttattacttctgtatacttgcactaagaactttaaaataagcctaatccactgaaaaattcaatatataattattaaacagtgccttgaagaatatattcccactgtagaaaaggattactaacagaacttgtggga

SEQ ID NO: 451 - DNA, 501 bp, Bos sp.
ggaacgacttgggctctatggtgacctaaacgggatggaatccccaaaagaagggatgtatgtacatgtatggctgattcactttgctgtacagcagaaactgacacagtggtatacagcaactgtggtccaattaaaaaaaataaaggcaaattgatggagaacacaaagcatttatattatttttcaaaaataatgattttgtcactaaaatgccctcttataccaaataccatgtatttatttgagtrggtcttatataggttcttcacccaaacacatgtatacctgtggcggattcattttgatatttggcaaaaccaatacaatattgtaaagtttaaaaacaaaaacaaacaaaaaaacttgtgtaaaccaggcccatttcaacacagagtcgagaagtacatttcacctctaagttttaaaggtgatgtggtgtttgttactgttacgtagcacagagaaaatatttaagcaatcacaataaatgaatttcgt

SEQ ID NO: 452 - DNA, 501 bp, Bos sp.
ggtgactcagtaaagaattcacctgcagtgtaggagacacaggttcaatccctgcatcaggaagatcctctgaagaaggaaatggcaagccactccaagattcttgcttggaaaatcccctggacagaggaacctagtgggctacagtccacaggctcacaaagagttggacgtactgagcacacatgcacagggacggtgtattcagtaaataacttcaatttaatgagatttcaatgtgcctttataamtaacaactatttttgagtgattttttttaaaggcattttcaagtttaaactgcagtgaaccactaatctgctttctgtttctatagatttgcctgtgcctgacattttaaataatggaatcatacactgtgtgactttgaggtctgttttttttttttccactcagcatgatgtttttgaggttcatccacttgtagcattgtcagaacttcattcctttttatggtcaaacaatatttctttatggaca

SEQ ID NO: 453 - DNA, 501 bp, Bos sp.
gctggggcaggagctggccccctctcttcctctctcagatgcctctgaattctgaatttaccgtgtcaagtagctctgttctaaaatcctctacatccttcctgggttgttatagagaatctgtccttgaaaattatgctcaacaagctaatgctgtttcagttcggattttattcatgttctgcttattataagtgacaggaaacctagtcgaaaacttcttaagtgaaaatgaaaattttgctcctaaractaacacaatattgtaaatcaactacacttcatttttttttttaaaggaaaacttcttgtccctttagtgtaaaaacgcagggacttccctggtggtccagtgattaagcctccgtgcttccccttccagtgcagggggcaaggctttgctacctggttggggaactaagatcccacatgtcatgcaagcaaaaatataaaagtaagattaaaataaaatgcagggatttcagccatggctgaatccag

SEQ ID NO: 454 - DNA, 501 bp, Bos sp.
aagactctggcaggctacactccatggggtcaaaaagagctggacatgactgactgactaacactatctctgggggaggctaagatctcacatgccttgctagcaaaaaaccaaaacataaaagataagtaatattgtaacaaattccataaagactttaaaaatggtccagataaaaaaattcttaaagcagtgagcataaatcagtaaggtttagaaaacaaataaaaatggaactaataagagcataytcattattcagagaatattcatgagcataattgttggatgctattttattacatatgatcatacctgaattttatttgtgtcaatcaagtgctgtgccatggattttaggataattgcaaagaagaaccaggaatgctgttaggaaaagaaaagacaatcagaaatttattatcttacagcaaagtaatgataattctgttctttacaacatgcgatactataaaatctttatcttggaatgtattcttt

SEQ ID NO: 455 - DNA, 501 bp, Bos sp.
taaaactaatcagaacagatttcctggagcatgaaaccctaactaggttctctactaaaatgtacactaaagtcagctccaaagtatgactcaactcagtggagtatttgcctaagcattccagaatagccagggtaggtgatgcacacagtttgttgacgtgagcaaggaaacatgaaagagatctgcttagagatctgggaactatgtttcatggtttgctaatatgagttattattagcaatcagcamttcttaaagatcaaaaaaaagtatacaaagaagagagaggaaagtgtgtttagcttttaaatatgtatcataaaccacaacttagatctgttttctggtgatttggctccattatttttccagatgtcattattcctattttttaacactacccatctgcagaagggctcaaatattcaaaccccaccacatagcttttcctgtctatatatctagtctgacttcatcaaacacatacacattttttttt

SEQ ID NO: 456 - DNA, 501 bp, Bos sp.
ctctttaaaatctaacctttcttcttcctgtcttccactatgatttcccatactggaaagctcagttttagtgaaggtctatgttagccccttgtttctcattaacttagaccatgacagtgaatgtcctgtcactgatggcagagaaaatcaagaagatgagtaattagatggtctggaagatttcctatctcaaatttacttcatgctgtccctgttgtttgtttttcttcctttgattaagtaccaaycaaaatgaaattaaaattaaaagatgcttactccttggaagaaaagttatgaccaatctagatagcatattgaaaagcagagacattactttgtcgacaaaggtccgtctagtcaaggctatggtttttccagtggtcatgtatggatgtgagagttggactgtgaagaaagctgagcgctgaagaattgatgcttttgaactgtggtgttggagaagactgtttagagtcccttggactgcaaggagat

SEQ ID NO: 457 - DNA, 501 bp, Bos sp.
ctagagggaagaagacagctttgagaacttttgggaggcaaataggacttggtgattgatggcatgtgccaagtcagggagttagaagactccaagatgaatcttggatttctaatgtggaccaatggacatttaatgagaaacaaaacttagaagaggcaaatttgggggaaacaatagtgatgacaagttaaactttggccttaatgagtttgatgtgcctgtgaaggcttataattatataatactgsatttcagtacaatagcaacttttttttttggctgcatcaggtcttcactgcattatggggagtctttcattgttgtgcagattctctagttgtggtgtgtgggctccggagttgcagcatacaggcttagtcactccaaggtatgtgggatcttcgttctcccctgcattgcaaggcagatttttaaccactggaccatcagggaagtcccacaatggcagctttgaaacctctgtctgtgtgatgttga

SEQ ID NO: 458 - DNA, 501 bp, Bos sp.
  misc_feature (1)..(30): Nucleotides unclear in positions 1 to 30
  polymorphism (251)..(251)
nnnnnnnnnnnnnnnnnnnnnnnnnnnnnntcatttccgactctttgcaatctcatggactgcagtacaccaagcctccctgtccttcaccatctcccagagcttgctcaaactcatctactgagtcagtgatgccatccaaccatctcatcctctgtcgcccccttttcctcttgccctcaatctttcctatcatcagggtctttttcagtgagtcagctcttgcacaataaaaaaactttataattcaygccatttaaatcccaagataactttatatggttagcatttttaaaaaacatctcattgcttcttatgcaaacgaaagtaaaaaatgaagtctctcagaaactgatattaagcagaccaaaaccaactcttaagaatgtagatttaaacatcataatttaaaaatctgatcgagcagacagagaattctctaccccaaaataatgtcttaaatttatttagaacatctaaaaaatgattggctttgctggt

SEQ ID NO: 459 - DNA, 501 bp, Bos sp.
tagaaaacaaataaaaatggaactaataagagcatattcattattcagagaatattcatgagcataattgttggatgctattttattacatatgatcatacctgaattttatttgtgtcaatcaagtgctgtgccatggattttaggataattgcaaagaagaaccaggaatgctgttaggaaaagaaaagacaatcagaaatttattatcttacagcaaagtaatgataattctgttctttacaacatgygatactataaaatctttatcttggaatgtattctttgaaattaaatgcatcagagcaataatatagtctccatgatgttaggatcatccttagcaaaattctaatgggaaatgtaaataccagatatttctgtttcccagtcatctctaagactgtataacacaagaaactggcttatttgacatggctgattagacagtcgtcttaggaaatacttattcatggggtgttctacctgttttccttaaac

SEQ ID NO: 460 - DNA, 501 bp, Bos sp.
gtctttgcccttaaccattatccaagaggacctcatgtcattgtccgacagctacccagctatcacacatattaaaattagcccaatgtgcaatcaagtccattatttttatttttgtcaaatagggttttaaagatttggtacatatatttgaccttttagaaagtttcttcttcttactgaacactgactttaattattgaggtacacttcagttatgttaccgtgtctattaaaaaaacttaacaaawatttttgcaaaataaatcttgacatacacttttcctgtgttcagtttaaaattttacttccttcctaaaacaatcttggttccttcatgatataaatttccttaaagttggtgttatcatggcttacccagagctaaagattatttttctttgtgaccgtcagacatcaggcataactcgtaatgcagaaggcaagctatcacaaactgagttgaagtaagttgtcaaatatgtgttattagaaagtctc

SEQ ID NO: 461 - DNA, 501 bp, Bos sp.
tccccgacctgggatcaaacccaggccccctacatttggagcatggagtcttagcccctagactaccaaggaaataccaatatgtgtgtaatttttagctttaaatactagacgtccttgtccgtattttatcatcctaatctttttttagtgtactgcttatagaaatcactaatattcctctcgtcaccggtgatgtggaaaaaacattttggtttctaacagttcatagcacttctattaatgcttcrtatcataagacaaaatattaaattgaaatgagaaaaaggtgaatgcctaagacctgaactgttttgcataccttgatctctccattgcaaggttacttagatgctggtgggaggaggtttaaatagctttaatagtgctggttttatcaattgctggttatatccataacctcatgggcaattgctcagtgaaaacccaagaagcattttgtatctatttgaaacatacacacactcatttaaatacaca

SEQ ID NO: 462 - DNA, 501 bp, Bos sp.
gctgccgtctctggggttgcacagagtcggacacgattgaagcgacttagcagcagcaggaacataacagatagttctctgccactattccaaagtttgactcataagaaagacctaacagagtttctctattatgcaaacattctctgcaaatgagtctgtcaaggaaacatttttccgaaaactgtgtctgttaacagtgcttgcatacttacttctacaatttagaatctattgttttttctctactyggtttttattttatggtaatgtaggctttttccagttaaaataataaatacctttgttatactcaaaacattctttatacattaaattggtacaaataacataaagtctatttgaatttaaaaatacaattcattctctcattactaccctgacaagttactaacattttaattcagaaaataattgatgttatataagattatttacttaacaatgctttgaaatttaaaaagctgtatactatttcaa

SEQ ID NO: 463 - DNA, 501 bp, Bos sp.
  polymorhism (251)..(251)
  misc_feature (403)..(501): Nucleotides unclear from position 403 to 501
gaaggtattgttagatataaattggatcatatatgaaggaagttaaatgccaaaggaattttcccaagacttttcatttttcactgaactcatctaggaagggaaaatatgaaaggatataggaaaataatgttgtgatgttgatgcttgtatttaaaggcagagagaatttaagacaacttgtaattttgaactagaaacatttataaagaagcactgaggacctaaaatttgacatcaaaggtaaatgytgaatgaaaatcttaaaaccttttataactaattataatttagtatcatcatgagaaatttgtatgcaggtcaggaagcaacagttagaatagggcatggaacaacagacttgttccaaataggaaaaggagtatgtcaaggcttgagaacnnnnnnnnnnnnnnnnnnnnnnnnnnnnnnnnnnnnnnnnnnnnnnnnnnnnnnnnnnnnnnnnnnnnnnnnnnnnnnnnnnnnnnnnnnnnnnnnnnn

SEQ ID NO: 464 - DNA, 501 bp, Bos sp.
gcagttttactgtcatgtgcctagaggtagtttctttgtatttattctgttttggattcataatttactttgaatattaggataatctccttcattaattttgaaaaatgattggctgctcttttcaaatattgttccgtctccttttctctctcctttccaaggggaaccctattgcatatatcttagaccttttatctatgtcatctatgtttcttatgatcatctctgttttttgataattttattaytggttagttctaatcattactttccatgccttgaactggccaaatctcccctcacctcagtgcctgtacacgtgctctgtctgggtcacggtctccctttaccttgcctttgccttaagtcacttattattcaagtctcggcttagcttaactctctctaggaaaccttttatgacccctaaattcttgcctagattcagagtactgtgtttttcctcagtgatatttcttatccccctcatattcaaaa

SEQ ID NO: 465 - DNA, 501 bp, Bos sp.
ttctaagtaattcctttcaagaaatcaaaattgaaagtataagctctttaggactgaatgacagtgggaatattgaatacaaataactatgaaattcagctacagtcatactctggagaaaattcagaatttaatgcctttgttattacacaagagactaagcattcaactcactcacataataaaaataacaccataagaaatctaaagaaaggaaaaggatataataaatataaaactagaaatcaatwgataagcaagcaaaagtagaaaaataatggataaaactaagaatctgacctctggtgggagtgaagggattaataacagatacatttttagaaaaacaaattggttaccaagttcacctgaaagaacaaataaagaccattggttaaaaatgcaagactgaaaacatgcatttaaccttcactctctcctgaaatcctacaaaaatgagaataaaggtatttttctctttgtttgatttttgcgtaaatt

SEQ ID NO: 466 - DNA, 501 bp, Bos sp.
agtatcttggttgagacaggaatgacaaccatgcctgcttgtcagagttttaaactttggagaccaaaataggctttataagctgccactaaaaagaacagataagatttaaatacacaatgagaagataagaatcaacttggaccatcctcctcagacttgggcaaagctaaaataagtggaaatatcaccgcaagaacagtgaggcaagctgactggggagaagaaaaacattttaaaagtatgagackatatatttaaaaaactgtcaaagaagcctcaaattaaagatcccaagaagaaaataaggagatctagaagtagatgaactagagaaaaaaagcggaaatagattaagaaggtgaagacaaagaagtggattctatatcaaagggggaaaattgataagttaaacaaaatagtatgaaaactacagggtaaaatataaaaataatagaagaaaatcacatcttaattgataatatgtctggaatgcagact

SEQ ID NO: 467 - DNA, 501 bp, Bos sp.
gagctcaacctaaaatgaaaagttatgcatccagtaaatttttcaagaggcagttcatttttatgcttattattaactttcattatattcattaaaatgttcaactttatcctaaatcacctaaatcttccatgagctctgcatgtggaaaagaagttggcagatgcttaatttggagaaattgcttacttttgcataaaactaatttttgtaagagccaggaaaatattagaagaaattatttatgtgcytaaaaattcaaacattttggttttgaacagaggcataaagagaatacatctcatatactttggaagaaagcctcagatgtatgaaactcaaaaggaatgaataatagcaacttatttgctgggcaggagtcaatcaattctcacttatttaatgagttaggaaacagaatgaaggtggggtaattttcaaaacacatcttccacagtccttgtttacagtatatttataatttacctgggaatacaaggc

SEQ ID NO: 468 - DNA, 501 bp, Bos sp.
ttgattgaatttgctcaaaagaagatagctgcactgttaatcatatttattagttgatcttaagaattcatgcatttaattgttctagaattagagataaaccttggaattatgactgtgagaaatggccaagagtttcattggggatgacagaaggcaatgctgagcaagaaggaggtttgaaatcctgcattaattctagagttcatcaacctatgactatggaaatctcgatatatttgaattgcaamaatttataaaaaactcttaaatactttttgtccttctgttttctccttcaatataagcctacaaaattataaggtacttaagtgttgggaccatgtctctgaatctttaataacaaacacactctcatagtaggtgtccaaaactatattattgattgttttatatgtgagttggagaaagatgcataaaaatgtctaagcatgctagaattctctttatttattttttggctgcaccactcagcttcca

SEQ ID NO: 469 - DNA, 501 bp, Bos sp.
taaattgctaagtcaaaatgacaatattttgaataaaatttatataaattatgatgccataaaagtatattatttttaaaattgaattagtaatttcataacaatcactaattagtgattttacagctgagtgttagtcattcttccatactctgtctgcctttcttgcacttaaaatgtctatttgtctaattggagctttttgttctaatttgggataatatcattaactttttaaaattcttcaccaygttttaatgatcaattactttatattcttaaatgttagttacaataatattttactcacaaatttccattgaaaattttcatgtaaaataactccagcaaatattaacatggctcattttacccaagcaattgtgctttcatttcttttatattgagagatagtatagcccacgaaggacacagactctggcatcagactttctgcattcaatctgtttgcagccatataaatatgtgaccttgaacaaa

SEQ ID NO: 470 - DNA, 501 bp, Bos sp.
atctagaacacaatctttaacctagtagtaatttttcttcaatagatgtaaatgcaaatttgagaaaaaattcaaatattagttggttaacgtctcatagaatgcataattaatctaagtctaaaatatgtaaacttagaaattctgaatcaattgatcattgatattactagaaaatgtttaattatgtaagcaattctttgttaactgaaaggatttcactttttaaaaatatctatatctttttcttycataattttaagcaaaattttcataacaaataatttatttttgtcctctatccatataattataatattttattattttgaatgaattttgaaggttaaacatttcaatgaaaattaaacaactggatctgcacacagcgaagctattgcccgaggtatctggtgtactgttacaaggaagttttatgatatgtattgtttatctcaacctacatcttaccatatcttagatgtctgctaactaagatta

SEQ ID NO: 471 - DNA, 319 bp, Bos sp.
tcaacggacataaatttgagcaaactccaggagacagtgaaggacagggaagccgggtgtgctgcagttcatggggttgcaacaactcggatacaacttagagactgaacaacaacatatggcagaagaaaataactgatcattctagctgcattcataataaaatttgagatgagaaatttgatcatttgagatggccatgggaatggattcaattatagctaaaaatctactaaatatctactacatayctatgtttttaaaaatgtgttataactgaaggtttctttgggtaaagcaactagattgtcctgtccac

SEQ ID NO: 472 - DNA, 501 bp, Bos sp.
tctgtttgtatggagtgcctggagggcgtctgccacgagtctggtgctaaccgtgctaaccaggagagctggctggttggggagaagacactaaccctgtgagtctgacccgggccagctaacccaccctgaaggtgcctccagccacgcctctcgtctcccttcctgcccctggcctcctcccctctgcttacaccgagccatctcctctgcgcgcttgtccttaccactgggttccctccgtttgcccrgtctccttgccgtaggtggggctgtgcacaggtgcctgtccacctaccagccggctgctgggctctgcccccattcctcccctcagtcagtatgtgcctctcagttctcccttagaacagcatgtctctttaatctgcttttagcaccatggagtttgagagcatccctcagctaccgtgctgctggtttcatgcctcagagacagatggaaggagagtaggaagggaattttctgctagactggatagt

SEQ ID NO: 473 - DNA, 501 bp, Bos sp.
ggtcagtgttcagcctgcttgaatgaacttcttccagcttcaccagctgagactgagccctctaaggatctgaatgctgctgtgtggcttgtgatctagcaggcaatggaatattaggagccagtcaatttccatgagaaatactcaaaaagggacaaaatcagggccagggtgagttagggctgatatatgtttttccttttttaaattattattattattgaaacccatcggtggtgccaggaggtgayggtgggtgagaggaggctgtctctctatcttaccccacatatccatcatcaactcccatctcttccatatcatctcagtcaaagcatcgtgaagtttgtgaagcttcagactctttcccttcactgggcactgaactgtgtctccacccccaccccccaaagacacactgaagtcctaactctaggtacctatcaatgtggcattatttggaaatagggattttgaagatgtaatgagttaacacgaggt

SEQ ID NO: 474 - DNA, 462 bp, Bos sp.
agttctttacgtaaattatctcctctagtcctcaaaatctacctgtgaaatagattctactattatttcagaggtatgaaaaccagccccagatcctgtaaataagttgcccccttacacacagatagtccgtgttctcagacaccacactcggtggtcattcatgggaccgacattcatgtggccacaaggagagctggggattgaatgtgattttgtgtcagagaccagggctcaaaccacagcccctmcagctcccaggtacaagacacgggttaaattatttagcctgtctgagactcattgtcttcattaaatttcagcatgcttctcactgggacaaagggagagagagggttacatgatgtaatttaaggtcagttcagttcagttcagttgctcagtcatatctgactatgtgccaccccatgaatcgcagcacaccaggcctccctgtccatc

SEQ ID NO: 475 - DNA, 501 bp, Bos sp.
  polymorphism (251)..(251)
  misc_feature (327)..(501): Nucleotides uncertain in positions 327 to 501
cgaaagcagctcacccaggctggtacgtgggcccttggccacttctctcactcagagcccacccagtagggagcacccacctcctcacccaggcagacaagcgggaggctggccagatccctgagggacacggtgcattggaagcagcagcctgcaggtgtgagatggagctgaggctggagcagagcttgaagctgctatcctggcctgctttcccacactggggtcagccacaccctccttcccttccygctcctgaccagctgtgtgcatgtagcctgctgtggctacaaaacttcttaatctggccactgctctagcagggcnnnnnnnnnnnnnnnnnnnnnnnnnnnnnnnnnnnnnnnnnnnnnnnnnnnnnnnnnnnnnnnnnnnnnnnnnnnnnnnnnnnnnnnnnnnnnnnnnnnnnnnnnnnnnnnnnnnnnnnnnnnnnnnnnnnnnnnnnnnnnnnnnnnnnnnnnnnnnnnnnnnnnnnnnnnnnnn

SEQ ID NO: 476 - DNA, 501 bp, Bos sp.
acagaaaataaataagcagatgagtagataaaaaaattccagagttcttcagaggatgtgaataacaacagtgtcgaatagaagtaagacagtgtggtagaggagaattgggaaagagacgaggtggtttcccgtggagaggcttctctgagaaggctgagcctgatgtttgatgtggaagataccccgtgaatcactggggcgagagtattccaggctaggggactagtggtggaaagaccctgaggccrtcaagagctggtttgggcttccaaagtcttgagaagatgactcaactcctgccagaaagcagtagtcgcccttccttctgtgtaggggaaaccttttctcacctttcccagctgatctaaagtttccctgaaacaggttatgacccttggccaaccctttctctcctggctccctcaaaaacagaaatgcaaaaaagacatcaccgttgcatgagaaaagatgaaagatgctattctgacttctgagtgg

SEQ ID NO: 477 - DNA, 501 bp, Bos sp.
caaatgaagcaactaacaagggatcaatctttaaaatgcacaaacagctcatgaagttcaatatcaaagaaacaaacaacccaatcaaaaaatgagtggaagacctaaatagacatttcgccaaggaagacatatagatggtctttatgtaatctttattatgacaattctatttgacttaatactgttcaattcacccattttaaatggttttaaggtctgcagaagactgggagagagcagtgtgagcygtgaagcttgtgcagaggttaacagataagaacagagtaggggaagtggaaaaggatgtgctaggggtcagctcgccatctgattcctctgtctcccacagtaacttacatatgcattcagtacatcttgactataagattaaggggcaataataggctcatgtggcattttattacttcaagtataaggccactgacaagaagaggagacagactggcacaaagccacagagagaacagaaggcaccct

SEQ ID NO: 478 - DNA, 501 bp, Bos sp.
tgtgtgctcagcaaagcacctggggggccctgcacttcctctttccggtgagccaccagcccaggataacctcgtactccctgccccttaaatcccttaggatttgacgcaagagtactctggtacttccggagtcaagacactgtgttaacgcagcaaaaaacaggactgcggcctcttggagggatctacagcccttggagatgctgagaagcagtacgaaccgggtgcatatgcagcggaggatacarcgttttgaagggcagtggaatgaccccgtgtcatcatacctgtgacagttggcccaatctcatgccactgtgcagagggcaggcagaacgattgtgtgatgcttgtgtactgacaggtggattgtgccattgtactaacaggcagaccaacgacagagtctatgaaggacaggcaaaccacgttttgttccatcaggaagacgaacgcctggcactatattgaggatcggcagagctatgctattgtact

SEQ ID NO: 479 - DNA, 501 bp, Bos sp.
tgaaggacgtgacaacatgggagcctctccagaggcccaagagacgtctctcggagggaaggacggtacgtccctccctggaggactgcccagccctggggtcaagcatgagccccgactctgcctctggagcaggaatggggggccagggagagctgatgccccctctcctgctcttcacacagagtttgccaccactaccgaggacaccgtggagagcaaagaacccaagaaggcaaagagggtgaggscaaggagggagaaggaggcctcttgagggtgacgaggaaaggcagcaaggcctgcagttagacacggggagaagtcgtctccgctgagggctggtgccagggcagggaaggggtgtgtctttctggctgcggggttgatgtggctgaaatccaggcaggaggtgagctgcattgatgggctatcaacaggaggagggagggaggtggtgcaggggcgtggagaggggactggggggtggtgaggacagtg

SEQ ID NO: 480 - DNA, 501 bp, Bos sp.
atatttttggatgcccgctctgtgcctctcactgcaccaagcaccctctgaacaccagtatcttccacgtggacatgtagcatccacccacttgctgaacatcaagtgaagaccagtgccaggccctagggatgccagtaagatgtgggtgagacagagaagcaggtgctgaatgtttgctgtctttagaccagaaaaggtgaatgctctcccggaggtctgaccttgagtgcctgggacctgtatggccwtctgcccttacaacagctgctacaattgtttgaaaaagatgtctggaggcaatggtgtggttttttttttttttcctctttggtttacattgaagtcttaaaactggagattgaatattttgtgtggatgcaaatagtgccatttggttccattcagccgaggtttgtggccccctgtcaacaccatgtttctgggagggaaaagaaatgtaagactccttccttccattttttagtgaagctttgcaaa

SEQ ID NO: 481 - DNA, 501 bp, Bos sp.
agcagcatagctctaaagtgaagaaaacatgtgttctgttaaaatattgaaaagacttttgctgggaaagaaaataagctttaagctagtagctttaagctcatgcccacgagttgtatgggttaacagaacataaaaggcatgcagagaggaccccctgtttctctactcctgatctgatttcaccaagtttatgtcagaatgttctgaagcttccttctcagaatcttctgatgggccaattaggcacyggccatctccctcagcctgagtcagggtgaggatcttcacagtggctcagtgttgctttgtactgaagatattcctgcaataaaagttacctttctggaaacatttggaagagtgaaatgccgcatctccaatttctagcaatatattcgcctgccatcattcagcctggaagcttaagtaggaagaccacttggagccagacttcagagtgatctgtctctaaggaataactttcatattggactgttt

SEQ ID NO: 482 - DNA, 501 bp, Bos sp.
ggaaagcatacatacatctttaagatgctctctgatggcttgaaaggcaccagattgactacccaggaggttgcagtagcctagattttaaaggccatctcttctctctttggcagcagtcaggcagttgtccccctcctgtgacaccaatatgcctcatgaggaagggcagccaagggagggcatttttcaggccccttcccggttcagagcatcccaaagaggtgccaatcgtcatgatggcttctgtrcccatggccatctgcttactgggctttgggcagatgccagcgtatttttctcttcatgacgatgcagtcaccattaggtagcagtgctgtcttctctccattactgacctggcaagattggaccttagatctcttgctgtaaacaatatgggaggtggttctccttgatggaattgttggcttatgaatttgaatcaattatttcaacttttgtcttcagggtcctggtaaagagggactttttaaagac

SEQ ID NO: 483 - DNA, 101 bp, Bos sp.
ccctcttcttaactccactctgaagtttcccttcctgtcctgctcacgtcygtgagtctgtcctctcccacccactggccctctttctctctgtgtggcaa

SEQ ID NO: 484 - DNA, 501 bp, Bos sp.
taatttttctctgttactatctgagaatcaacaccacagacagtagctactggatgcctgtggtgtggtttttagttgctaagtcgtgtccgactcttttgcaactccatggactgtagcctgcaggctcccctcttcatgggctttcccaggcaagaatactggagtgggtcaccatttccctctccagggtatcttccccatccagggatcaaacaggtatctgttgtgtctcctgcattgtcaggctractctttaccactgagccatctaagaagccaactggatgcttaatgacttcttcagttgtgtttctcaccccatggaagcctcaatggtttgacctggttgaggaaagcctatagccttgtccactgattatcatcttcactgactactttctggatgtctctggctttatcctgatggcttccagagcactatccacttcaactggagacctttccctttccattcattttccctgtcatattgcactt

SEQ ID NO: 485 - DNA, 501 bp, Bos sp.
agatataaatttagctcaattccaatcaaaatagtatgatttttttgtggatatagacaagctgcttttaaaaattttacagcaaggcagaggaccaaaatagtcaatccaaaataattctggaaaaggatacccttgaaggagtcacaaagacctaccacaaagctgcagtattaagacagtgtggcgtgggcttcagggcagcatagatacatagattggtgggagaaaacagggcgtccagcaatagrctacacagacacgttcagggcagcacagatacatagattggtgggagaaaacagggcgtccagcaatagactacacagacacggcccagggattctgacaaaggtgtgaaggccgtcaagagacaaatggcagtgttttcaacaaatggtgttgggccaactggaatccatatgcaaaaagcgaacctcagctgaaacctaccttctagataaagtgttagttgctcagtcgtgtctgactctttgcaac

SEQ ID NO: 486 - DNA, 501 bp, Bos sp.
cagtcccttctccttggttgggtggctggtggaaacataactgcctacgttgtagcaggggcttctgaaaggcaatgtgggtctatctccacagatggaacagagggcagagttgggggtgtcaggaggaaggagaaagccttgtacattcaagacaccacatgagatttcccttctcctggctctcctgggggcttacccaagtctatgttgggaggggtagcaggagttaatgtcgactcctgtgactrttcttggggaggggctgccccagttgactgaccaatggctcttttggagactttcaggatcctcagagggtccttggagttcagccagggcagctctgtgttcagtctgcttctgaatgcaatttttatgtagggtttcacttgaagaaactcttcacacctaacaactttgagagcagctgcttcagtctaagttgggatcactttattttaaaaacagccattttcatcaggacctttcaaatattgt

SEQ ID NO: 487 - DNA, 501 bp, Bos sp.
atggagccttcacctttaaacttcgttgctaaatcacaggtatgctgactcctcatttattccccatgacaaacacgcttagaaagtgtattgtcattgttataaaagaaattaaattggctcagtgaaaagtgatttgctacatttatttcataaaggtactctgtattctgggcatgagacaatcccctcgacatgaaagtgacaggtggtcgaggaaggaatgttgagagccagaaggaatgttgccyttctttctgcagctcacaagctgttcccaagccacagatttccacacccttctgcacaccccattaggaaattcgtccatgactcttgtaggattacaccttagactgattcccaaggggggtctttggccaaaataaaaagtgactcattcgacagaattaggaccctgagagtcttgcttctatttttaaaggtattagatccagagaatccaagttataatgacagacttcatgggtaagttaactg

SEQ ID NO: 488 - DNA, 501 bp, Bos sp.
gttgtggctcccctctctggcctggtctctcacttaggctgcacattgatcgtctgcaccctcagggagtgtggcagctccctgagagcagggctccaggccccccacgccctacaagagatccagcacgtcgtggctgtgtgaacaacccttcctgcacctctgaccccctctccagcctccatctgcgaaactcagggcagccagacccccaggagctaaggcagctgccccgtcagcccaacaggagyccagcagacctaaaaccacggccctaaagcttgcacttggccttgattaagcccttgcccaggtcctcagcggctccctgctgcagtcttcccaccacatccctggagaccccagtcagcaacgccgttggttcatagttgagtcaatacacaagtctcttaaaagtttagttattgtgtgtccttgcagaggacgcagaacaactaaggaaagggaatctctgtctccccccggcacaggctgagccct

SEQ ID NO: 489 - DNA, 501 bp, Bos sp.
tccttgtacaattgttttgttgacattaagtagaaggtttgtgaagcaaagctactcctctgtctggggttctttcacctggctccttgccactgactaggtctgtacaggcttcccaggtggctcaatggtaaagaatccccttgccaatgcaagagacatgagttctgatccaggaagatcccctgaaggagaaaattacaacctattccagtggtatttcctgaaaaatcccagggacagaggaaacsggtgggctgcagttatgtccgcaaagagttgggcatgactgattgagcatacactgaggtctgtacaacaatgtgaaatttctgggcctcagctttctctggaaaagaggttgcaagacgctgtgtgggtggttcagagtcgatcacatatattaagcgattagtgtggtgcctggcttctcttgtagctcagtcagtaaagaatctgcctgcaaagcaggagacctggattcaattcctggtttgagaa

SEQ ID NO: 490 - DNA, 501 bp, Bos sp.
atttttttttttaatccacaaaaagtggaccagagtatttgtatttcaaactcccattgttcaagggtcaactgtaatcttacgtggtatcaggcccctaaaattgttatatacttttttgtatctaagaatgattccatgtgtcacctaagatccatctgggtatgagcttgtgactattaggcttctctgatagctcagtttgtaaaggaaccacgtgcaatgcaggagaccctggtttcattcctggstcaggaagctctgctggagaagggataggctgccctgactctactattcttgggcttcccttgtagttcagctggtaaagaatacacctgccatgggggagacctgggttcgatccctaggttgggaagatgccctggagatgggaaagcctacccccaccagtattctggcctggagaattccaaggactgtatagtctatggggtggcaaagagttggacatgactgagcgactttcactttcacttg

SEQ ID NO: 491 - DNA, 501 bp, Bos sp.
attaccttaaaggggcttccctggtggctcagtggtaaagaatctagttgccaatgcaggagatgtgggttcgattcctgggttgggaatattccctggagaaggaaatggcaacccactccagtattcttgcctgagaaatttcatggacagagaagcctggaggggctacagtctatggggtcacaaagagtcagacatgacgtatcgactaaataacaacaacaaattcccttaagggaagcatctgycttccttagcctggagctcttcttggttgtttccaagatgctgacccatgtgtctccctgatttccctttacttccatctccaatcacaaccctccatcatgtctaactcctattaaagtgaagcagtctttaaggtccaactcaacacacacctattcctgaaacctgtttttatttctggacagaaaagaacttcatcttggctctatcagctcttactctttccttccttagactctcaaatttctc

SEQ ID NO: 492 - DNA, 501 bp, Bos sp.; identical to SEQ ID NO: 203

SEQ ID NO: 493 - DNA, 501 bp, Bos sp.
tgagtgaaggaggtaaggtcaaagcacaatcaatacacagttttgaaagtgttatgtacacaaagtgaagtgtagattaagggctgcagatgttgagaaaacagaaagaagactttgaactataggcgttaaagggaagtttcatgaaagtgacatttgagtttcatctcaaaggatgagaggtttccttctcgggtaacagctctgtgagcctgtgccaagatctaggagagctggcttattcctgaccrtgctgtgctaacatcgaaaggatgtaaagccttccagcatccctactcttcccagagcccagggtgctgtcgcccaagtggatccagacagcccaccttgccagatcacgagctataggtcactaatgatgagtgtgctctggaaggtggatgttctggatcacaacctttacaaaccttccaagcagtgtctgtgacttcctggtagtctttagtttgggcacactctttgtgtttatactgtgtattt

SEQ ID NO: 494 - DNA, 501 bp, Bos sp.
aggttcaatccctggtcagggcactgaaacctcataagccgtgtggcaaggccaaaaactaaaaagaccataggagattccaatatgacctcatcttaattaattacatcagcaatgccccattttcaaattaattcacattctgaggttctgcgcattaggacttcttcatgcccccttttaaaaaattatttattcatttggctgcatcgggttttggttgtggcacacgggcctctctctggttgagrcaaatggggtccagggttcacaggctcagtatttgcagtgcaagggcttagctgccctgcagcacgtggaatcctagttccccgacctgggatcagacctgaaccccctgcattggagctcgaattctcaatcactggacccccagggaagttcctcaatatgtccccctagggacacaattcaacccataatactcagggaagagaaaggccagagtcctactttgagagtggggacagcagagacagg

SEQ ID NO: 495 - DNA, 501 bp, Bos sp.
ccagggtctgggtctccaaggccaatagcagtgacactcttcaatccaaagagctcctgggcttgttttcagggttgtggagaagggagagatggagcgcctgtccctcactccagagtcaagctagaggggccagatctgagtttgaggaagctcactgggtctcagcattaaaacccccacatgaggggcagcaagttctgacattgctgttctctgcctcccttcagttcggactacaggtgtgggaygtctcccttcctcacagaagttcaaggtgcctactgagcgtaatttactgtcttcttatcaatgggcacgtgggtagtttcctaactaaatgttgctatttctgaatgctgctggcacaaaaacatctcaaacatgcatagataccaatggaaaagcaacttggaaagcaacttatcaatttacaagtaaatttcacacacaaataaaaattatgtatatttctctgtgtatgtatgcacacagaaggga

SEQ ID NO: 496 - DNA, 501 bp, Bos sp.
agggaggaattttgtgtggcctcccatttgagaacttaaatacgtgctgatccccaagtcatcctgttcatccccagcagtctcaatcttcatgtggttggtaagaataattctcacttgagagaaatgcttccacatcagtattgactgaggattttttttttttttactttctgagaaataggacagttaaacattgttttcattcttttgctatttttgtgtatcattcctgccattcagttcattcmaactgaagctcctccgtgacatacacttcacatctttgtgtgcattgcttccgccacttgttcatttgaaatcttcacggctgaaggcccggtctgatcgttcctcctctgataaagcttctctgcgaggactttttctttctcgtccctgttgcttgtttccttgctctgttcatctgttcacgcgctcaccgttctgttctgggagacagcagtgtggtttatgtctctcctgttctgtgagggcatc

SEQ ID NO: 497 - DNA, 501 bp, Bos sp.
atgtactttttaatgagaaatgaatcagaagaactgtcctggcaaggcaatctcctttagagctccagtaacagctgaagttctctctctgcctgagccttggcatgtatttgagggatgtggatgtgtgtgtatgatgttcattctttttttgtgtgtctgtgtgtgtgttgtttgtttcattttagttaaaaggagaaatgttattttctatattgatgagctttggtttgagcaaggaagagatgaasgttcctaggagctgtgggtcttcaataatggatacagtcgacaggagtactttctctgcctgagtaacagagaacccatgatgactgagtagttcagaaacatgggtagtcgcaccactgtgacctactttctctgcttccaaagagacagagcatctggagaccctgaatgcaattaaccaagctgcaagacactgcctacaagcctccgtcactgaggaagggtggcctgcatcttgctgagggttct

SEQ ID NO: 498 - DNA, 501 bp, Bos sp.
cgaaattgaggctcagagacaccacacagcttctgtgtgatagcagctcaacgcggcccctagggttgaattaagtctgatgtctccccactcccacattctatgcaccccatgagcacaccaggagcccgtgacctctacaccacactgtgtcctccacctgagatgccttcctcatcctgtctgtctgtttgactctttatctttgttgaagtcccctatttcaaccttaactcccctgggaagactcyccttgttcatatagccagcaggggtctgcagttacccacacttccctgtggtcttcccttcctgacaacttacctgtggatgttgtttgcttagccagctctcccaattacacaggataattaacaacagttataacaataacaatcgtaaactactacattttcttttaaaagatttatcttttttaatgttagataatctaaaattattaatacagaaaatgtgaatacttagtccatttcttgttaa

SEQ ID NO: 499 - DNA, 501 bp, Bos sp.
gtgctgggtccggctctgtctacaattctgtctctgtctcataaaatgacagatcagtaaacgagcagaaaatccaatgaaataatgtttaatacctagtaaggtgactgggacagagaacgctttgaggaagtgtctcccatctcctgaatcatctaccgttatccccgttttacagattgggaaacagcttccaacaggttaagtgagctgcccagggtcacagagctgttaaatctggtgctctggaygctgtagcatgctgtctccatttcacatgttcatggattaaaccatctaatgtcgagtcctttcttcagctgaccttagagttcataaacagcatcattctaatcagaggcaaccacctttcctcaaaatccaagctgggacttagaaaaacactcctcaccttatttttttttaaccagaatcctgttcccttagctttcgattcggtcagagccacagaccatgtttgggggctcagcagttccctcc

SEQ ID NO: 500 - DNA, 501 bp, Bos sp.
acaacccaatcaaaaaatgagtggaagacctaaatagacatttcgccaaggaagacatatagatggtctttatgtaatctttattatgacaattctatttgacttaatactgttcaattcacccattttaaatggttttaaggtctgcagaagactgggagagagcagtgtgagccgtgaagcttgtgcagaggttaacagataagaacagagtaggggaagtggaaaaggatgtgctaggggtcagctckccatctgattcctctgtctcccacagtaacttacatatgcattcagtacatcttgactataagattaaggggcaataataggctcatgtggcattttattacttcaagtataaggccactgacaagaagaggagacagactggcacaaagccacagagagaacagaaggcaccctgtttctatgataagcatttgctatgtacaagcctgcctagagactgagtttattgcttatttgttgcttcattca

SEQ ID NO: 501 - DNA, 501 bp, Bos sp.
aggtctgcagaagactgggagagagcagtgtgagccgtgaagcttgtgcagaggttaacagataagaacagagtaggggaagtggaaaaggatgtgctaggggtcagctcgccatctgattcctctgtctcccacagtaacttacatatgcattcagtacatcttgactataagattaaggggcaataataggctcatgtggcattttattacttcaagtataaggccactgacaagaagaggagacagaytggcacaaagccacagagagaacagaaggcaccctgtttctatgataagcatttgctatgtacaagcctgcctagagactgagtttattgcttatttgttgcttcattcatttgacaaatattactgagctctgtgtaaagttcagatgatggtgactaaaatcaagtgagatgcctgccctcaagaaacaggtctgggacttccctgatgatccagtggttaaaaatcttccttgcaatgcaaggggac

SEQ ID NO: 502 - DNA, 501 bp, Bos sp.
  polymorphism (251)..(251)
  misc_feature (477)..(501): Nucleotides uncertain from position 477 to 501
gatccttctcctcctcacttcctagcctagcctctaaaactagccagggctctgtggtcagactgcctgagttcgaatctcacctcagccacttagcagctgtgggacccggggcgagtcactgagtctctctgagtctcaacttcctcactggtcaacaagaagcatgcacagcattcatctctttgggctggtgtaaggatgacatgaagctaaatctaagcacccagcacagtgcctgacgacagagkatatgcccaacaaatgctagtgattaggtggcgctagtggtaaagaactcatctccaaaggcaggagagggaagagacgtggacttgatcgctgggtcaggaagatctgctgaatgagggcatggcaacccactccagtattcttgcctggagaattctgtggacagaggagcctgacgggctgcagtacgcagggtcacaagggtcggatgtgatggaagcaacnnnnnnnnnnnnnnnnnnnnnnnnn

SEQ ID NO: 503 - DNA, 501 bp, Bos sp.
  polymorphism (251)..(251)
  misc_feature (363)..(501): Nucleotides uncertain from position 363 to 501
tggtccctattgccagagattattagttgtttctagacccacttttttatatttgctaaaaattaattcttacattttcttaccttaagtgcaccagtcctcactccttacggacatcaccatctacttgtgctcctcattttcttaggcagcgtccagttctattaaaattttatttcagccagctgtgaataaattcctaacatagcccttaaacatttccctcttacttcctggcttgtgtggttctygtgtgctttaagtgcctaggccttgtattttgtagaaaaatgcaaacatagatgtgtgtaccatcactggcatttagccaaatgcaatgtatatagtatctccctttttttnnnnnnnnnnnnnnnnnnnnnnnnnnnnnnnnnnnnnnnnnnnnnnnnnnnnnnnnnnnnnnnnnnnnnnnnnnnnnnnnnnnnnnnnnnnnnnnnnnnnnnnnnnnnnnnnnnnnnnnnnnnnnnnnnnnnnnnnnnn

SEQ ID NO: 504 - DNA, 501 bp, Bos sp.
attgggaagtctggcagattgaagttcaaagtgtcgcaaagagttggccagaactaagtgtttaagcgtttaagcgcagacacgcatacacagacacacatatatatatatttaatatatatctgcatacatatataatgactgaacaacaacaaaaatacatacgactgcatttttgtgcatccccagtagatctggattccagtcctgtgggctccctcacttactggatcctggaccagggataattyactccccttctctgggctggagtttcctgtataaaatgagaatttggatctaggagagccctttactattctcacacggtttaattctttcctttcaagtataccataacacacagataatgctgcgtcagagcagggctgtattagcccacatgtgaggtctcactcatttcatgtgtgccaaggagcacaaggtgtggaaggacgcctgtagacaaagagcttgcaaagaagtcctgatatttacgtt

SEQ ID NO: 505 - DNA, 501 bp, Bos sp.
ctggctgcattcagacgaggttctaaagatgttctggttcccttccttcatcccagaggtgggtgggctttggagaccttaccttcatgtttcctgaggtgaggtcagaaacatggacacatggagtgtgggtgaagaaaccatattttgcaaggctggcccagtcgctctgccactgacagtcacacgagtcccaggatctgtgtgcgctggtcccaccctacagtagggctgtttagaacatggagggygtgactcgttcctggctgtgtggctctgggcacgaggtcatgtctctgtccagtgaggcagctagatgtgtctgccactccgtgtcaggtcatgagaacagaagcatctatctctagttcattcccgggagcctccgcacagggagggcacgagaaacgttcgcttgagcagtaactcctgttacaggcagtgatagaatcaggtttctttctttttttatttactttttaatgggagaataattgcttt

SEQ ID NO: 506 - DNA, 501 bp, Bos sp.
tgagcagagttctctatgctatgcagtaggtccttgttggttatctattttaaatactaacagaccagtgtgtacacgtccatcccaaactccctaactattcctttccctcgtgtttctccataggagatcactcctgtctttgtatgaaaagaaaaaacagacacaaagcaagtatttttaatatattttcttatggagtaattttgattcaacatgtgatcatttataacaaccacctggcatctgcrgacctacctacctccaacttctttaccctttaatctatccattttagactctaatattgaaaaatgataaggctttgtgaggaagaaattaaatgttaagaatatatatatacacatacatatatgaatacatatatactcatcaactttgctgcataacaggaaaataaacaaactctcatttaaatactctcataacatacatggaaggaaaagtaatgaccaacctagatggatgtgagagttggac

SEQ ID NO: 507 - DNA, 501 bp, Bos sp.
aagctgctcaggaggcatgagaaccactgtcctgcggctggagcgctcccctctcccatgctgcctgtgcgattttccctggaacagctctttctggcctgtgctggctggggccttcctctgtagagctcagctgtagggccacaaaatctcacaaactctcctgtgctgtggaagaaaaggtggaccacctttgagtgaaaacctctctctcactgtcatcctttctccaacagagctgatgtgtgtcrtcacttgctaggcagtctctccacacccacagtccgtgacaggtaacctcccaagcagcattaaacgcagcacatgaccatcccctacccagtcccatctcagtctcccagtcagagagcatcagccatactcatgagaaggattctctctagtaaatgtgaggtgagtatatggaagccctctttcatgaactctgtatttgtggccctgaaactactagctggtactcttccaattttgatgtttgtc

SEQ ID NO: 508 - DNA, 501 bp, Bos sp.
ctgtcgaggcttttataagcgctgctaacaggcaggaggatgtctgggtttgagtttcacctcctcaacccctcaccttctggaggaggtgctaatgagcagtgaaatgaccaccaggtgggaggcagaggaggatgtggccaaggagcttggatatccctctgctggatgctgggctttggaatccctgaagcctgacaggcatcccttccagaaccccacactgcgtcctacttggcacgaagaggaawataactgcagagtcagagcagtggttctggttccggaggagttctgggaaggagcccaaatggggcctctttctgtctggccctgtgagtaagctcccagcccccagcctccaccccaggcatcgtggcattgtaatagctgctctttctgttgagcagatactatttttattgatcaccttcttgacagaaatattaagccacagaatgttcctggcaggtggcagcctgagtgccactggcggtgcat

SEQ ID NO: 509 - DNA, 501 bp, Bos sp.
ccattaaggacttaaaacatttggataacaaaattaataagatctaacagaattataaagactctcatatttagaaaagagaatacatattcctttcagatacacatgtaaggctcataattgatcaaggactaaaattttattatttttaaaaaatttttatttatttaggccacaccaggtctctgctgtggcatgcagaatattcagttgcatcttgcaaactcttagttgtggcatgtgggatctarttcctgggcatggaacctgggcctccttctggtagcaaggagtcttagccactgggctacaggaaagtccctaaaattgtaaaacatgactacaaatgcagaaattagttaaatggaatataaatgtataatagaaaagattgacaaagggaacgttagttctttaataaaagataaaataatcaacaaacttctaagattagcgagaaaaaaatgagtagttacaaataaactctttcacatgtgacaa

SEQ ID NO: 510 - DNA, 501 bp, Bos sp.
tgtgagcaatgtaaggctcaagacacttatgaatggcatttttgttttttcttccttagtctttccacatttgttacatctggtgagtctatgaaccctgtttatttgcagcccagcactaatctttgacaaagcatcatgcttttaaaaggtaatttattagaagatagaaatcctcttggattttttccctaaaatatctgtagtccctttgccattgtacagtaacattttcacacctggctaccttrtgggaaagggagggacattattctgcccaccacgctccccttattcatacaacctgctgatcttcaaacagattttgtcccttcctccttgatcatctcgttcccaccacttcctttgtttgccatgcctacatcaaatgtctgatcattgttctcattgtatacacacacacacacacaccctacccatttattttcctagaatcttctagaggaatcaaatccataatgataatgatgatattgacag

SEQ ID NO: 511 - DNA, 501 bp, Bos sp.
  polymorphism (251)..(251)
  misc_feature (494)..(501): Nucleotides uncertain in positions 494 to 501
tgttagtcatcaggaacatggctgcaattaccacccactcattttccaagctagagctataaagagtgaaggatgtcatatttccttccactttagcaacatttcagaactgctagtcagtgtgaattcctttattgcctcctggttaatgattagacatctgtattgaggcatcatggccagaaaccttcaaggttctgggcactgggtttggtacaggagcctgacagacacaaattgggccctagacmttcagcgtttgcagtctaattgcagagacaaagctagaattataaatcacagagcttttaatcccttttctttccaagttttttgtaatgaaaaatgtcaacagtcacagaaactgaagtagtaatatagactgagcatccgtacacatatttatcacctgtatttaaaaactagcatcttccattacttgtgttgtctttgtgtctatatatgtgcaagaaagagattgttgaacaacttgnnnnnnnn

SEQ ID NO: 512 - DNA, 501 bp, Bos sp.
gttgtattttagatcccacatataagtgatattgtatgatatttgtctttctctttctgacttacttcacttagaatgatcacctccaggttcatccatgttgctgcaaatagcattatttgcttcttttttatgaatgagtagtgttcccctggatatatgcaccacatcttctttatccattcatctgtcgctggacctttaggttgcttccatgtcctggctgtttagaatagtgctgctgtgaacayagaggcgcatgtatcttttcaaattatagttttgtctggatatgtgcccaggagtggggttgctggatcatatggtaactctacttttaatctttttgtggaacttctatactattttccgtagcggctgcaccaatttacattcccaccaaccatgtaggaaggttccttttgctccacaccctctccagcatttattgttcatggacttttcttcatgagatggaaagcttaactgccattttggaat

SEQ ID NO: 513 - DNA, 501 bp, Bos sp.
acatcacatatactaattatcttagctgtcgttactatgacaaatgctcagtcagggacagtgccagtgacttcgtgtacaccctttcatttactcgtaacaatccggggaaggggaggggcactggcccttctcagagacactgacctgcctggcaacacacagctgccaactgcagagcagaaacaccaacccagatcatcctgaccccaaagaacacaggcgtctccgtgcaaacacgggagccacasagacaaccagtgttaccagacaacagacaagaagcccattcacccgagagtccacgcggacatctgaatcacctacaacgcctgacttaggagttccgaattctgagccaaacaccagattttgcacaccgtattgcatgagccgcagaaatgtgtgattttaaggagcatgctgggactctcgtcgaaggctgtctatagtcggattgatcagattcagatgtgaggtttgaggttggcctgcccttgg

SEQ ID NO: 514 - DNA, 501 bp, Bos sp.
tggccatgcaggtgataaacattggcagagaggtcatgcccggtacacgtttaccatcagtgttctccaaaaacagaagtaattttccaccaaacatgcacctttgttttttagctcgttacagctggatgcatttaatgaaaaaaaaatcacataagataaaccagtaattgtagatttttataatagaagctgcagaccattcagatgctctaggtcatgtgactctgcctaatctgtggtttcccgcrtccaccactcaccttgctgatgggaggcaaggaggcttcgcacaggcctcagcaggcaagtgacaaaactgcctagtaattcaactggtggcaggagcggcaggtttagaacggttccctttatgacttgcgagaaggacttagctactcctggttgcttcatccaagcatcttcctcaccaagtgccccgcactctgcccttgaaaggaaggtcatgcaaaactcacgagctcttcttagactggatca

SEQ ID NO: 515 - DNA, 501 bp, Bos sp.
gtccgactctgtgagaccccaaggactgcagcccaccaggctcctctgtccctgggattctccaggcaagaatactggagtgggttgccatttcctcctccaaaataggtgtatatcagacttaaatttgcaggctgttctatcttgaatttctctctccaaagaggcacatgaggatgatatatttagatatgaaaaacagcccacacttttcggagtgtttggtgtcacaaagccaattccctgcacarttgactgggatgcaatgatttcacgagaatgtcagagtaggtgtactgaaacgacattatggtgtcagaatgagatgtaatgacgttaatttgtctgtggaaagtcccagcctctgccaagacaaaagagcaccctgtactcagtcagcccagtgagcctggtgcccagacacccccagtagagagcccagctcgccaggccatgtgacattccacagggaacaggattcgtcttgctcctcctgcctgg

SEQ ID NO: 516 - DNA, 501 bp, Bos sp.; identical to SEQ ID NO: 23

SEQ ID NO: 517 - DNA, 101 bp, Bos sp.
cccttctctgaagctgggaacgactttttgcctcctggaaagatgggcctrcctgatgacacctctttctccatggcacgttgtaaattcagccttctact

SEQ ID NO: 518 - DNA, 101 bp, Bos sp.
agtgcaaggctgggggcgagagcctggcccactggctttcatgcaacttcygtgagtcacgcactgtgcaaattaaggcttcttataggtcgaatggtcga

SEQ ID NO: 519 - DNA, 101 bp, Bos sp.
caacgtcaccactgcctgctcgagagatcgtgcaaccagtcgaggatgctstgtgtgtgttcacagggtgtgctaaataaggaaggagaactggtgtaggt

SEQ ID NO: 520 - DNA, 501 bp, Bos sp.
ctaactacagatttctcttttataaagaagatagacacttttatttgcaacctgaaacatacctggggtcgcacagagttggacacgactgaagcgacttagcagcagcagcagcatagttgaaggaaagaaaaatacatcagaacaagtacaaaatagtacattacaacaattacaaagcagtgtattaaccaaagagtgaattcttggaagttctgggttttaagtgaggcttggggaagatagctgcygtaaatcgacagggaggaagttaaggaaaagacttcctgtttgggtgatgcaaccaggaagtgcagggacgtgggggcctgcacttgccatgtgaaggttgataaatacacagaaggggttttgttgagaatcagagagatgaaactgatgaggtatagtgtaaaaggagaggaaagaacatgcggacacaggaaattggattaaaacaagtatctactgagtgccattttagactcttggacataatga

SEQ ID NO: 521 - DNA, 501 bp, Bos sp.; identical to SEQ ID NO: 24

SEQ ID NO: 522 - DNA, 501 bp, Bos sp.
ctcaagtaagtttgggaaataatttattttacacatattttatgttacacatattttatgttttcaggtgttcactgaaaatcccatgactaaggaagttgagaatgcatattaaggaaggctaattgtctctgtcacagttggggataaaaataatgctagctgaatgttattgagtacttactctctgccagacagagtcccttaaatcattccgtcttcaccaaaaaaaatgccattggaaggcattrttatttccaggcttcccaggtggctctagaaccccctgtcaatgcaggagatgcaagatactcaggttccacccctgggtcgggaagatcccctggaggacatggtaactcactccagtattcttgcctggagaatccgatggacggaggagcctggtgggctacaatccaaggggtcgcaatacttgactttgagtcacgactgaagtgattgagcacacatggacacacattattattcctatttaca

SEQ ID NO: 523 - DNA, 501 bp, Bos sp.
atcaataaagcatcatccgtatcatgcagagtcaagacaggaagtagacacatcatagggaagggttaacccttgtgcctgctgttactagtaacaggattaagtgctgggttgaggggagacagagatgtggatgacgagagacaccacaggactggcctgggagtggcaggtgaggccacctggagaagtccacatcctcttgtatgatcccatcggttcttgtggggaatttgccttggaggcattcraaattctaaggaagcagcatggatgggtgtgggtggcagcgtctcagcggcaccaatgtttactttgaagagaaaatgtctgctttgtaggcaaatgttttcagcatggaaatgatcattgcaattgctgtggttgtcacaaatgtttcatcagagccgataaagcagctgagtgttggcaaaatcgatgaaaacatcttgagaagtgttcgctgcctacttagccgtctgtggctcatctggcgcgaag

SEQ ID NO: 524 - DNA, 501 bp, Bos sp.
tgtgcactaggaagttctctgtctttaacagttcaaaacagttgggtgtaaagtaaaccaaattgatttggttaccttttgaggaaagaggcattgctgcatagggttttttttttttgtttgtttgttttgttttgtgctcatagtttggaagatagcctgctggttttggaagccacattctttcaagaacctttgtgagcccgggtgccccaggaaacagtaatgctgatggaaggcagaaatttgcycctgtcctcctgtgaaccctaccctctgatggcctgctctgggttatgctacattaaatggcaaaaggggctttgctgatgtagttcaagttaagatcttaagataggaaggttatcctcaattgttcaggcaggttcagtgtaatcgaacaaggctttgaaagtagaaaactttctggaaaacttgctggagtcagagagagagatggcataagaagaaatctgacccatttaaagcatcaggaggact

SEQ ID NO: 525 - DNA, 501 bp, Bos sp.
aattacaatagtatcttttatgtactgaggtcttactgtgtatcagtccttctgctaaatacttaatatattgtatcagagactggctagatggttagcaatcccatttcctcttcctggatacacatgacaactaaatttcctagcttgccttgcaattaggtggaacatgtaactgggttttaaccaatgtagagtcgaattgatgggagctatttcctggcctggtctcttaactctgtctttgctaktctgtcagccagtggagggggctgattggaggacttcaagagaatggaaggaactggggtccttgaatcacctcacctcttagagaggagctatacaggaaagacacccaatctacctcagcctgtgacttgagtgagtagtgacctcttactgtatctagccacaggttttggaatttttgttatagcagctaacgttaactaccctgattgaggctcaaatattgtctcatttgatcctgattactac

SEQ ID NO: 526 - DNA, 501 bp, Bos sp.
gctcagttgtgtccggctctttgtgaccccatggactgtagccctccagactcctctgtccatggaattttctaggcaagaatactggagcaggtttccatttcctactccagggatcttcccgaccctgggatcgaacccttgtctcctgccttggcaggctggttctttactgcagagccacctgggaacctcttagtaagttacacacatgtagaaagtgggacatagctaattcagtcttgcgtccytcaacacctaggggtcaggtagactggttggctacattttatagtggctaagagcaggcatcagcagatttttctgtgaatactttagtttttgtgggctgtttcagctactcatttctgctgcttcagtgtgaaagcagcaaaaggcaatatataaatgaacagatatgctgtgttccaataaaactttatttgttaacactgaaacttgaattgcatataattttcatgggccacaaactgttacttt

SEQ ID NO: 527 - DNA, 501 bp, Bos sp.
tgagcagagaagatcaaaataactccagccacatgagtccctcttgcctttgaatgtgggctgagattcaggaacaagcccaggataacacacagcctgcggggagggggtcagacacacgagatgtgagtgctgggtccggctctgtctacaattctgtctctgtctcataaaatgacagatcagtaaacgagcagaaaatccaatgaaataatgtttaatacctagtaaggtgactgggacagagaacrctttgaggaagtgtctcccatctcctgaatcatctaccgttatccccgttttacagattgggaaacagcttccaacaggttaagtgagctgcccagggtcacagagctgttaaatctggtgctctggacgctgtagcatgctgtctccatttcacatgttcatggattaaaccatctaatgtcgagtcctttcttcagctgaccttagagttcataaacagcatcattctaatcagaggcaaccaccttt

SEQ ID NO: 528 - DNA, 501 bp, Bos sp.
tggcttctctgctgtacattcgacataggactgtacagtacagggaccctcagtgtctgattcttgatggaacctccctgctaattatttcaaccacagggccccagggagagaacaaaggctcagcacagagggctccagtggcacttaaccatacagcagccagaaggagctcaaggccgctctgccaatttacaagaagcaataagatccaagagactttgagtgacaaacaagaggcggtgggttartaactgcaaactcctgaatgtctgcgttttacagatacgttatgtatggtggtatttaccagcacatccactcaaattgagaaatagctttgtcaactctctttctctgtgtaatcaatctatggtatttacatggcgtgatttccacccccgccccccttaaatcttgatttttcaatatattcttggcttaggttcagctgatgatttatcttttagaaaacgatttctttagaatattcaatcgaca

SEQ ID NO: 529 - DNA, 501 bp, Bos sp.
aggtgtcacctcgctgcctgcccacaactgggaggattccatcatctctgaggctaacaatcagatgagcctggggcaccacacagactggatccttctcctcctcacttcctagcctagcctctaaaactagccagggctctgtggtcagactgcctgagttcgaatctcacctcagccacttagcagctgtgggacccggggcgagtcactgagtctctctgagtctcaacttcctcactggtcaacargaagcatgcacagcattcatctctttgggctggtgtaaggatgacatgaagctaaatctaagcacccagcacagtgcctgacgacagaggatatgcccaacaaatgctagtgattaggtggcgctagtggtaaagaactcatctccaaaggcaggagagggaagagacgtggacttgatcgctgggtcaggaagatctgctgaatgagggcatggcaacccactccagtattcttgcctggagaattctg

SEQ ID NO: 530 - DNA, 501 bp, Bos sp.
aaaattaattttttttttttttttttgtggatgtgccttgcaacatgcaggatcttagttccttgactagcagtgtttgaaccacatgctctctgcagtagaagtgtggagtcttaacctctgggctgccacggaagtccctaattatttttgtaattggttttattgcctacctttctatccattagaattctgtatatattttggaatttggtgtttataggctcattttgagtaggtggtggtgatgkctgttgctactgctgtttcttctcttcttcttcctccccctcctctttctttattgttttattttcctctattgctctctgtatgaaacccttatctctaatttgcattttctataaaattgtctcttctcactgagaaccagttctctcttctcttggcttctccaacatgaggtctagaaccacatcttagagtatatttaattagttcccaagttcacattgttctcatgttttaaggtcttttagt

SEQ ID NO: 531 - DNA, 501 bp, Bos sp.
gcacaaaaccaggcgctgtgtcctcctgtcacctttgatgtccctgcctgcctagttgagaagttcctctgcctccttcacctggtgacactgtctttctgactgatcccctttagtctcctcttatctgtctttctatcagattctttgtctctgaagaagcaggttcttgcctgcctggggccccaggtcaacctaagtttgggtttagatagaaactgttgaccttgggccactggatctgtgccatrgatgttggtcatgtggtctgtggtcatggatattgagaaatacattcaggaatcaattgacctattccttggttctagatattcagcctcttggctttcctgagataaaccaacccttctaatatgggttttgtggagtttcatcatctctccttgtctgtctgctttttctcctctctctcttctattctctccttgctttactgatgctctgctgtcagtgaagttccttagactctcttctgatttc

SEQ ID NO: 532 - DNA, 501 bp, Bos sp.
  polymorphism (251)..(251)
  misc_feature (497)..(501): Nucleotides uncertain in positions 497 to 501
tcctcctccaggttatcttcctaacccagggatcaaacccgagtcttctgcatatgcaggtgggttctttaccacggagccacccgggaagcccatgggacaagattagtggatggttatatgatgggtctgattatcacaaagacccagttttagacattctactccactgtcagacctcagggtggattttagtttgggaaaataaccctcaaggcgcatgcataattcataaggccacttttctgtgkgcagaggaatggtcctcctgatgccctgtgagaggaccctgagaatggggagctggggtctgtcccctggtctttgctggcaccgggcaggatgcccacgccgggctgggcaagaagcctgcaccctgtcaccactgcccccacaccagacacctctgagctttacggtgtgcatgtgagcttctgtctagatgcccttctttttgctcacagcccagaacctcctatttcccctttaagaccctnnnnn

SEQ ID NO: 533 - DNA, 501 bp, Bos sp.
aaggaatggctacccactccagtattcttgcctggagaatcccattaacagaggagcctggtgggctacagcccatggagtcgcagagtcggacacaactgagcaactaagcacatttactgctggaaaacaatcttctgttctgattgactcatgttcacactaggtaacacacaggtcttggtttctttattaattacaggcagctgttgaaatcagtctccccaacttttcaccatcaagaagccttrttggtgtcccctgtctgcaaagctctctcaatttgagagacactgctgtccccacgcgctggtgtccaaggccagtcacgtactgaacaggtgcaatttggccagtgaccacatgccggctgatgctggtggcagcatcttgtccaccaaccatgacctagaaattcctatgatgtcacctacaaccaatcagggcttctgattaacctacgctcacctggaagatcacagagttaatttaattctaatt

SEQ ID NO: 534 - DNA, 501 bp, Bos sp.
ttagtggttgccgggggctggaacaggaacagggaagatgggaaatagccccggggatgtttgggggaagatggaaatgttttaaaattagattttggtgatggttgagcaatgctgtgaattttatggtatataaatgatacttcagtaaagctatttaaaaaaaacaaaaaaaaaaaccctggaattccctggcagtccagtggttaggactcagccctttcaatactgtgggtgtgggttcaatccayggtccggaaaccaagatccagcaagctgggcagcaccgccgaaaaaaaaagctgaagggctaacactttattgggagacagagtcccagacaagcaagagaaaagcgatgggcaatgaggcagggaagggggtacagatgctcaggaagatggcatggccacacctcctcgctgacacctttgtgaaggtggcctgtccctgaactgtgggtcccaggtagagaggaagaggcgtgcacccccaggccca

SEQ ID NO: 535 - DNA, 501 bp, Bos sp.
tgtgaaatttcccagagactctccttctaatttacactaatagatatgcaggtcatatggaaaattaaacaccaaaatttgaattttgggggcaagagaatttatgcacacaaatcctattaccagctaatgggatttgtggggatccccagtgacctatttagaaaatgtaccccctgctgttcaagatgaatatatcatgtgagctaaaccagaatacttagtcctgcagttggctttatccccagtcygtctgagtgatccctccatgatttctaaaagatgctggcaaccatagcagtttgcatatctgactgacagtgcaaaatgacatctatattttcacttttaagttctccaaaatttgttgcaaatattttttaaaggcctcttccttcctttctcctttcctctctacccttccttcctcctcctttttttcctccttgtcttcctgctctcctttttctcctcactttcttctccttattcttaaatgta

SEQ ID NO: 536 - DNA, 501 bp, Bos sp.
tccgccagctctgtccctccttgtcttcgtgaccttggccaaatcacatcctttccttttgcattagaaggactgattaatccctgtcccgtgttctttcgtggcatttgtgaagattaaatgtgataaatggttggaaaagtgcttgaagactgtaaattgatgtacaaatggaagggattaagggattagcttcaatccggtaaagattttctcttttatagaacaacctgctaaacatcagtccctaygagttgccagcacacacacatacataccacaagtgtgtgccctaatgttccttcttgtctccccacgtggttttttcatccttcctcctgcaacactcttgctcaacataaagatctttatgcatcctgactttagggaaactgtattatgttagacttctcatgcctgagggcaacatgttaatgatgatgatgatggtggtgtgtgtgcctgtatgtgtctgcaaagtgaaagggaaagtcgctcagt

SEQ ID NO: 537 - DNA, 501 bp, Bos sp.
acatgttcagaaagcatcaactcagcccgtctgctctccaccatggagaggtatcctctgctccaagaccagcccctccctctgtgtccatgatgtcatctaccctggttgttgtgagttttgagccctccctcaatcctgtctgtcatcttaagtctttcctactccactgattttttgtttttgctttttgttgaattgcatattcaaagtttcccctaccttttgaaacaagaccctgcccaaacacsgttccctttctcttccttctcctatgaaatgctagcccatctccctttctttcctccccagtcttctagaaagtttcatctatacctgctgcctctgcttccatacccactccctctgtcatttcttgtaacttcctcccacttcctcataaccaatctttcctcatgcccctgagctgtgcattctttcagggcttaccagagacccgtatgggtttgcagtcaccatacgaattggcgtcacatgcat

SEQ ID NO: 538 - DNA, 501 bp, Bos sp.
tgcacgcacatatattctgcaaacctaggctcttttcctgctttgccacattgcgttcagaaaagacaaacacttgccaacacaatctcaatctgtccactccccagaccaccccggccagtaggggccaaagagatgggactctggattagcggtgcagggcagtggacactggagactgggggatgccacctcccagttccagccgccgggactgagctcacttggtgttgtcagagtcgatggtgtgraagagatcctccagttccctctcgttgaggacgccatctgcaaagaagagctggaactcctccaaggacaacttcccgtcatctgtgagggagagaaagggagggcagctggtgtcgaagcaacgggacatccccaaatcaacagaggagccacagccaggcaatccctgcccgcccctgccaactccccagccagcagccacactcccgcacggggcacccctgcccgtggcatgaacccacattagcc

SEQ ID NO: 539 - DNA, 501 bp, Bos sp.
accgtggaccccggggggcccggggtggcagctcagagaggcccagccagtccaggtccttcccagccaccaggaatggtcaagttcagctaagggttccaacaattcagatgcctgctctaaacacacacttttccacttttgcagtgtaagtgatatattatacaccttaaatttttgtcagttatacctcaataaagctggaaaaagtgataaacctaagaccacagcctccctgtagaccctctggyagttctaagttacaggggcttcaaacaagggccccagggctcaggtgtgacctgcacctccagctatgcccccaaggtctgctcctcctcctggaagaatctgggactttgcagaggccgtaactgggggaaaggagtgcttcctccatgtcatttgatgactctctttgctgttgtttctggaagatgctcctgaaagctgacacgcaaaagctgggcgccggtgggggtacggggtggaagcaaagga

SEQ ID NO: 540 - DNA, 501 bp, Bos sp.; identical to SEQ ID NO: 1

SEQ ID NO: 541 - DNA, 501 bp, Bos sp.
ccaactttcttccctttggccccatcagggttgatgtgaagcctctttcagttgctccaatctccctcacgttctcctcatcaccactccccacctttgctcaaccctgaaaattgtattgatttgatgatcatggggcccatgtttattttattttatttatttattttttttgagatgtagggtgtggctcctgtcagcatctatgtggtcctggacaagtagttaaccaaactctcagtgtctagtgrggatggcagctctagtttcataaggcggctgcagagaaatgagtcagtgcatgtgaaagacttacctatatttccacattgttggctatcactaacgttctccacttcaccctcatcaccacagaattttgttccttctttcccgggcattcctaacatctttcttacaacctttctttgaaactcaagccccctgatctcatttccttaaactttgacaaagatgatagctcttgagttcatacctgat

SEQ ID NO: 542 - DNA, 501 bp, Bos sp.
gcaggttttacatttttagttttaatttacacaggaagaaaattaagctcggaatgttcagatgacctggccaaagtgacttaggtggtatgtgatgcgatcgatgtgctaatccacatccaaacctgaatgaagcctttccacttcactgttctagaagacacggaaattcaagggaaaccacagccccatgctcagtgtggttccgcaaagtcttttctttttacagttctgttcatcaccgcctagtrccaaaagaaagcttttgcttttctctctcctgtctctcctctgcctgaaaaactcatttgcattaggtcttaaacaatgctgttggctcatttctcataggaaactgtggaggataggaactagctttttctggagcctgccaatgtctaaatcaaaacttttcctctggtaataggcggtcaggatggaccttgtccaattcttttttacttccaggacagttggtgtctgtgcctcccgtcctgcttt

SEQ ID NO: 543 - DNA, 501 bp, Bos sp.
gatttctgtttctgctttcttctacatataatgcaaagaggattctgatgaaaataatttaatagttaagtataatttttttttctaattacaaaaagtaatatatgatgacttaactgaatttagaccatgtataaaggtataagggcttcccagatggtgctagtggtaaagaatccatctgccaatgcagtacacatgtgttcaatccctgggtcaggaagatctcctggagtaggaaatgtcaacaygctccagcattcttgcctggaaaattccctggacaggggagcttggtgggcttaagtccatggggttacaaagagttggacacaactgagtgacttagcacacacacaaataaaggtataaagaaaaaagtatccagaattccacagataaaacatgataagcatctaatgttcttcctttaaatgtatatgagaacaaaatgtgaattgtggattatttggaaggcggttgaagaatttaaaataattt

SEQ ID NO: 544 - DNA, 501 bp, Bos sp.
cataatctatatttaatgttacataatacacaaaggtgatagagtaatctttccatttgggcttcccaggtggctcagtggcaaagaatctgccttctaaagcaggagacttgggttcaattcctgggttgggaagattccctggaggaggaaatggcaacccattccagtatccttgcctggaaaatcccatggacagaggagcctggtgggccacagtccaaggggttgaaagagacttggacaggacygagcgactagaccacaaccaactctccacttaccaagcccttactgctgtttccacaagcatcagttagctgtacaagactaaccaggttcatgctttaaagcaggctccatgattcaagcaatacagaactaagctagtgaaatctagactaacaaaccaaaaatctcaagaactaaaaaaagtcttttctgttttgtgtgtatgtaactgcctctaccactgattttggagtgcttcagagggagtgc

SEQ ID NO: 545 - DNA, 501 bp, Bos sp.
agggcctttcctcctgctgagcacgctgataatcagttaacattatgtcacacctttgcaggtaaaacaacaaagcccattgatcttatgaaccctttcataaaatttgttccaaaataaataaatctatattttgcacccagaagcttagtttggacagtctttttacttgaattaatatataataactcctcttgatttgatataaacaaaacatgaacccaggcacatcaccctctgctttagacaayagagtgaatgatcaggccctcatccccctctctctggatacatacagtccagccgaggagataaacacacagctatgactgtaaagcggacctgaccagagccacagtcacaccagccgtggcagttcagagtgcccacggggggaggctgtggacctctcacctggacggcagtgacaagtcttgagattcactccagacacatctcagtttctccttcatccacttctccacatgcattctctcttct

SEQ ID NO: 546 - DNA, 501 bp, Bos sp.
agtgtgaaactgcactgaccctattgaccttttaatgatttcattttcattttgctgattaagctctaaatagagcctagttaagactgaaaaattagtataaagtgccaagatattgaagtttacaaaacgaccactacttgtatggtacaagtccgtccacagatggaggttaccatgaggatgtattcgtgtcacatgattcggtccattgcagaagagagtaggagggaaagctctcagcaaagggrgaaacagtggtcatagcatttgggcttttaactgtgcttgactgcctcttattccatctgtcacctttggattatattgtttctgagaataaaatatggcaatgtataatggtgatgagatgggtctcaatcacaattcatttcaagtctccttggctgaactaggtccaggaattcagcaagaaaagacagtaataatcaaggagaagaatgaataatcatgcaatatatagaaattcaacaggaaagt

SEQ ID NO: 547 - DNA, 501 bp, Bos sp.
taatagtttttttcaacttgtggcaataatagatttttttttaacttgagcataatagatgataattgccctgaagacagcactgacctttaaagttcagcaatctctagactttcaaactttttaaggactcgctataaatttagtctccagaaaaacacctaaatactactgaatcatttaagttttttgactttcaaatattaactgaccatctaataaaatggtgctggacttaccagattcgtccygagacggccttgtttagcttcaagggcttctctcctgcttctagaaggatttctaatccttctagattagaaggtttcatctagtcaacaagctatgactcttagttcagactgatcagagttttgttaagtcttcattctctggaagtttgtaaaactttagtttcattttgatgacttagaagatgacaagaagttcactagctacagtctcaccttaatttatttgttggccgcatggcttgcagga

SEQ ID NO: 548 - DNA, 501 bp, Bos sp.
tcatccttgcccaacccttagtggttccaccaccaaagtctccccaccaaaggcactccttgtctggggctcacagatggctaattaattaattatacctggccacataaagaactggctgggcgggtgttcccagtaccattgcctgttacagcactataggcagctgagaggtgaaggatcaggagagctaggccaaaaagtcagaaatagccagttgaaggagaaagacaagtcctccatcttgtaaygggggctgggtttggatatatttaatgatctattgctatgtaaaaaactattctaaaacttagttgcctaaagcaataacagtttatatttttcttctgactcagcaatttggactgggctcatctgggtggttcttctgctctactttgtatctgctgtaacatccataatggtttctttattcattggacctcagctgggagatacgtctcttcagcaactaagcactgaattttgcacccaggaaat

SEQ ID NO: 549 - DNA, 501 bp, Bos sp.
aagcctcgaggcaggggtggaccggaatgcatgaggaagagcaagccaacacagccggagtactaggcaaagggacaggcctgactgaccagagcaaggatgggcatttatttttaggtaaaaacaccgaacagaaaatattttaagctttacaggccacacagagtctctgttgcatagttttctttgcttttaaaaccaatcctttagaaacgtaaaaatcattcttatctcatgagccttacaaaaaygggcctaggcaggatttgacctgtagaacttagttcagctcctgtaaggattttgacttttactctaagggaaatattatttgacgcatgttttgaaagaatcattatggttgtgggggaccagttagaagaacactgcagcaatgcagagcaaacataacaatagcttaggccagagtgggaaccaggaaaatggggtgaaggggtcattagattctggctttttaacactctccaccccaataaagtg

SEQ ID NO: 550 - DNA, 501 bp, Bos sp.
tgttctcatacaagccacgtttataagccaccactctgggattcggggaagaatcacggccactcggtctcctctctctaaaccacagggcttggtgagcacattggcagcctttcgggacaaggagcccagttctccaaagctccatttcacctcatcccctttgccattcacccaccacagggctgggttggctggtctctctcctgtctaggtatgcataggcacatgggaaagaggggagaaggcgygaatgagtggtcatcaaatagatgggacatatttggtgtctttccctcagcatttgtgctggtggagcccagtaacagaaccagtttgtctgtgggggagccactattctatcaaacaccgccttgttgagacaacccatcggggtgcccgtccttccctgatcagcatgtgggcctgtgaaccaagttgggccaatcacaacttctgtccctgattgagttttctgagaagaacaaaaagatagaaaat

SEQ ID NO: 551 - DNA, 501 bp, Bos sp.
taaagcaacatgataatttataatgagacatatgaatggaaccaaaactatgtcaactgtttttcaatccaaaggaaatcttacctggaaaggccattgttaccacagtttgcaaaaactttggtggaaatatttgaatgactttggccagtatcgtcaagttgtattaccatctgtagttcagggaaagaactaccaaacatactgaagagccaagtggcttaactgggaagctccctctgatcaccttyctctcccttatttctgtgtccatcaccttcttatattccctctgtttcattttcattgtgtttccagtttctaacaaagggctaatcatatatgtgctaaataaatgctagattgaatggtatatgttcacatctgttgacttaaattttgttgaaattgagtaataatcaggtggattataaccagtacctataggaggttatagttttaaatatgaagttctttgttagttggaacaaaacagtttct

SEQ ID NO: 552 - DNA, 501 bp, Bos sp.
cacattcttggagattctcatttaataggcttgtagctcaggaatctgtgccttctttctccttctgtttgttttttttttaaaggtatatctgcatagagtaaagttcacagtacaaagattatattccctcccacctttgatttccagtctccagtgcctccttccacaagcaactcctctaacttttcttgaaggccctccagaaatactgtagacacaaatttgtacagactgtaggtacacatccrgaagcaccctttacgtaccactgatttttgttcattaaatatttcttagatattgttccccatcagtacacatagatctggctcttctatttaatagctgctgatattccaattgcatggatatactatgatttgtttaattttaaagatatttttattggagtgtagttgatttacaatgttgttttagtttcaggtatatagcaaagtggatcaggtgtgtatatatatatatatatatatatatata

SEQ ID NO: 553 - DNA, 501 bp, Bos sp.
aaagtagtaggttaggttatatatatatattaaaaaagtaaatgttgaagttttctgaatgcagggcttgacaataccatgcaaccagttgggctttagaactctgactgtacaggactgggaaggtcccattgttgcagtgtgagatcatcccatcccaatgtttgctctgtaactgaatgatttttgcttatttgttttaatatttactgtgtgtccaccttctatattctgtgtagtggcagggtagyatttgggaaatgggaggaaaggtaacttatctctagcaaatatacatctttacacttgcatggaactttataactgaaagagtgttttctgcctgtggtcttcacaacaaccctgtgagatagttagggaaggaatgattatcctcgtgttataggaatgagactgaaactcaggttttatgactcactcaaatccatcataactaaaaatggaagacagtaggctccctcctagatattcctgttccta

SEQ ID NO: 554 - DNA, 501 bp, Bos sp.
ctgcagctattattatctcagcaaactgcagcttttactattatgggtttctcctcatagaaatcatacaatccactttctgtcagtaccacctctgggtactagttgcaaaccttacctctgagtaatgaatttcaaacaatgactcttagggatccatgcagtggactgaactcataactttggcctccttagtaccactgagttgtccaaaaggagatacataagaatcactcttcccacttaacaayatccggcaactgacaagacaatcagagcacacggaccacaggatcagccctctagaatcaggagtctaacttcctgactcccaggtattcccgttgggccagcatgtcttaatggatattataaaccagagcacacaggtggtggggattaaatgagataaggctggcaaaatactcaaggccttgtcttaaacagtgttcattacatgtagttaatataaatatcataaaattaatgacagcacaccaa

SEQ ID NO: 555 - DNA, 501 bp, Bos sp.
tagtcctcccactcatgttagcagaataacgcagggatcacagcagagtcagtgctatattgagaaaagttatgaaaggcttggagctgaaataaagaaggaccagttgctaactagagacctctgccctcccaggggctggagagactaggctggtttgccaggttctatcatgagaaggtctaagaggaggacttctcctctggggagaaaagacaaggttttacaagagagactctggtttcaggacrggcctcctatccaaagttgagggaaaggaactcaatagaaccgctccaagctgatgggtgtctaaaaagaaagagaaatttgacaccccaggccctgtttgcatgactggtgagcactggtcttgcggatccacctcagataccaataggggagtaagcatggaagcccaagatgtgatggtgggatcagaaggtggagtgggggtgggggggtgcagtgaacacactcgcagtttcccagaccctcatg

SEQ ID NO: 556 - DNA, 501 bp, Bos sp.
  polymorphism (251)..(251)
  misc_feature (461)..(501): nucleotides uncertain from position 461 to 501
ctgcagatgtaattctgcttcaggttctgggatggtcaagcctgaagagagtctattaagctgtcttattccttgtaatagattagttttaattttcttcagtaaaagccagtgggtatccatattttcccagtttaatagctttcctctttatccacagtgccttcattttggcccaaccttctgcattgggcttttaggttgtatcttagttttataacttggagttgtaacatagctctgacatcaaygggagagtaggaagcagctggtcaagggtcatctgtcctcgttgctctttggactggcagcccctgctctttcctagctacacttggcccctggagtcttttgctggactgcatatgctttttaaacaggagggaaggggacagggcacaacctgtaaaagactgacatggccataggacatgacaaactggttagaaccagctaggtcnnnnnnnnnnnnnnnnnnnnnnnnnnnnnnnnnnnnnnnnn

SEQ ID NO: 557 - DNA, 501 bp, Bos sp.
  polymorphism (251)..(251)
  misc_feature (332)..(382): Nucleotides uncertain from position 332 to 382
  misc_feature (445)..(445): Nucleotides uncertain in position 445
ccagtttaatagctttcctctttatccacagtgccttcattttggcccaaccttctgcattgggcttttaggttgtatcttagttttataacttggagttgtaacatagctctgacatcaatgggagagtaggaagcagctggtcaagggtcatctgtcctcgttgctctttggactggcagcccctgctctttcctagctacacttggcccctggagtcttttgctggactgcatatgctttttaaacargagggaaggggacagggcacaacctgtaaaagactgacatggccataggacatgacaaactggttagaaccagctaggtcnnnnnnnnnnnnnnnnnnnnnnnnnnnnnnnnnnnnnnnnnnnnnnnnnntcattagtcaaagaaattagcctatacacttaccatgccatattatgaggctctctctttcacnttctgagatggtccacattctgtctgaatgtgtttctctctaagaaatccacttac

SEQ ID NO: 558 - DNA, 501 bp, Bos sp.
ttttcctagaatcttctagaggaatcaaatccataatgataatgatgatattgacagtgattgcaggggcctcttgaggactctgatcaagagggaatcattgcaaggctgctgcagaaacaggcttaattgctgtagtgtttaatgcaatcaattaagttcatcattttttaaaatgttatatcattgtatttaagattttaatatgaattttctttaaccaccaagtttttgagtgagtgagtgaagtygctcagtttccgactcttcgcgaccccatggactgtagcctatcaggctcctccgtccatgggattctccatgcaagagtactggagtaggttgccatttccttctccaggggatcttcccaacctagggatcaaacccaggtctcccatgttgcagtcaaatgctttaacctctgagccaccagggaagcccatttactctaggacaaaactctaaaaggatttctatcttccagtgaattgggtacta

SEQ ID NO: 559 - DNA, 501 bp, Bos sp.
tctgaaaacagtgacaatggggattcatgaaaagataatcccgaagagttggctagttcctctctccacgtcttttggttctgtgtttattccaaaccagatgaccagcttggtgagatcaccatatggttttttgtaaactttagtatctttgctttttacattgaaaactgagatctcagacttcatttgatttcccatacatccataagactcagtacctgcctcctttccccctagtccttcatcayatacatactgcttctggagactctcctagcctgacaactagaaagaaagaagcaatcacaaggtgtagagaattctacggccagctgtgacaaagaggcagtttgtatggtggttagaatatgggctctggagcgccaccgcttactagctaactgatcttgaacaaattaacctccctacatctgaatcttgtttgtaaaatgggactaacattaatcaacagtctgaggatcagtgagatatgtataa

SEQ ID NO: 560 - DNA, 501 bp, Bos sp.; identical to SEQ ID NO: 559

SEQ ID NO: 561 - DNA, 501 bp, Bos sp.
ttgctggagagagagagacactgccattttgcattgtgaagacattgcttggtaattatgattgataacaattcttgcatgctttttagtcatggtgtaaataggcacactcaattaactgcgtcaagcccattgtttaagaacaatgcataggccagaatataccaggcagatactgggcgaaagtgaagagagaaatctcaacagaaacagtgctctctagaatgaagagtgtgggctttcctcacagytcagtcttgacatgttcatccagttcatccatgttcatccctgcagtggccctgactcagtctagggcttcagccctgcttaccaagattctaggcttcttgtggcctgtggtctgcaactcagctggtctggagggcaggaaggaagggtggatcctcttgagatttcctgtcttgctgtgagtcactgataccaagcacttttcttgcagttctctgcctactatccggagagcgggaatgcagccgc

SEQ ID NO: 562 - DNA, 501 bp, Bos sp.
ctgtagctatatcaccttgaggtcaccttgggaatcttctttttttaatctcaaattccaaatagcttcagtttcctcatctgtaaaatttgaataccagtaatgattaataaatttgtggcaaagagatataaaacaaaagtgcatataaatttcacattacagatcaaactggaagatatggttttgtttgtttacttatttcatttcagaaaacggagaaggaagaataagaggagggaggacgaggkcttgattttgagtccaaagactatggcaaatgactattagtactaatattttcctgtgtatatgcagatatactgtgcttagtcactcagtcatgtctgactctttgcaaccccatggatggcaggctcctttgtccatgggattctccaggtaagaatactggagtgggttgccacgccctcctccaggggatcttcccaacctagggatcaaacccaggtctcccacattgtaggcagattctttacc

SEQ ID NO: 563 - DNA, 501 bp, Bos sp.
tatgcttttgctactttacatgtacatgaggctttatataaagaaagtggtcttctgacagccaatagaaaggacattaaaaacaaagaagaaatcttgactctattagatgctgtatgggaacctgaaaaggtagcagtgatgcattgttgggggtcaccaaaaagaagacaccccacaaacatggagaaacagactagcagataaagccacaaaacatgtggctgagaaatttagggctgctggtgggktatctatcaggacctttgtactctcaaaaatgcttaagttaactttgactctcccacagtatatcctggcccaagaccagctagctgaagcagaaagggccaccaaaaatgaaaaatatcaatgctgcccctggacataaacaaaaacctccaggaatatagttaaaaggcacttgaagtagactttaaatcctgctgacacttatggtatgtaccttctcaagatgggtagaggccttccccacctgaa

SEQ ID NO: 564 - DNA, 501 bp, Bos sp.
gtttggctatgtaaacctgccactggagtaatgaagaacagaaaatatgccaggcatgttttgtagtcgttatcattttctattgggtcacagggttggtgccagaggagcagtgttatgtgttggttcagagtgtgcttgtgttgccaaattgtctgggatcaaatccattgtcttccatttaccatcataggtaggtattactgatgtcctgttttcagatgaggggactgagcctgtccccaggagaytgagatcttgaactagtttctttacttcaataggagccagctataaaatgagaaatactgagtacctacttcatagaattgctctgaggattaaatgagtttatatatataacgtatgtagcctgggcatatgataagcatttaataatacattttagctattattgtgattatcaaatagtcatttacaggctgatttttagagtcaagtcacctggattcaagtcttagcttctacttacttgttgta

SEQ ID NO: 565 - DNA, 101 bp, Bos sp.
agggagcatcttccagtgagaagaaagtgagctggaggcataagagaaagygacaggataggaacaccacctccccccaagcctaataaaatcttttatat

SEQ ID NO: 566 - DNA, 501 bp, Bos sp.
gtgtattaaccaaagagtgaattcttggaagttctgggttttaagtgaggcttggggaagatagctgctgtaaatcgacagggaggaagttaaggaaaagacttcctgtttgggtgatgcaaccaggaagtgcagggacgtgggggcctgcacttgccatgtgaaggttgataaatacacagaaggggttttgttgagaatcagagagatgaaactgatgaggtatagtgtaaaaggagaggaaagaacaygcggacacaggaaattggattaaaacaagtatctactgagtgccattttagactcttggacataatgacttaagaaagatttaagccagggtgtgaatattggttgagttccaaactggtgatattgggtgtttctaccaaatgtccagttatacttttatgattggtcattctattttgtgactgttaattgttacttttcaggaaatctgctgatggcattggcttctacttttataactgcagatat

SEQ ID NO: 567 - DNA, 501 bp, Bos sp.
ctgcacgcacaggtagcaccttcctgctctgttcctgggttccctctgcagggggctcgccaccgtaatcccatcccaacccttgcccagacaaccagcaagcctccatctggcccattccctggtgtgctctcctggccttccccctggggctcacaaaatggggagagagggctagcatcccagcaaaagatacgccaggtcagggacaaatcagagagaaaaaagttcatttttcctgtcgccctcaygttcaagtatgtattttctccagtgatcctgatttttgtcacattattcatatgtctttttgttatctgaattcttgaaaaccacctaaaactgttgataaaaagggtattattttagtggtcatctactccttctctcgtggcttcccttgtggtaaagaatctgccctgctgtgtgggacactgggtcaggaagatctcctggagaaggaaatggcaacccaccccagtgctcttgcctggaaaatcc

SEQ ID NO: 568 - DNA, 501 bp, Bos sp.
gccctctcctgcccattccccaaactgctgctttcccagcatcagctttgttctgaaggtagagccctctccccttgacccctcccctcaggatggaaacccgggagaccatgctgcagactcctgcacccccgcctttgcacccactgaatcctgtcccttctaggtcagcactgtcctttgtgcccatccattcctccccatccccgacgcccctcattgcatcttcagctgctgccggaatatcaccrcttggttgtctaagaaaccattcaaaccaatgaagttcaaagctgttctcaactccccctcaaccgtacactctcacctgtgtttcccacctcagctgctagccctaccatccctctaacctgcccagcaccgcagtttggaaggcatcccacctgtggttaggagtacaggctctgccctcagataactgtgtgcgtatctaaccccagtacttttcagctgtgaaccctggggagttatttaactttg

SEQ ID NO: 569 - DNA, 501 bp, Bos sp.
gtagattgagtagcacgggaaaataagacatttgaggtaaggccagtgtgctgatgaaccagccatgccaggatcctgagagttttccaagcagtagcaagagcttgaacaaagagcctgagacaaagtgtatctggggaacagaaagtccaatatgtctggaaccaggtggtagcagataatgtcaaagggtgaacaggatcagaccccaggcacattaagggcatgtggaagaggtgggatcttctaaytgggatggaaagggtttggaggaatcttagcagcaatacggggcttccctggtagctcagatggtaaagaatctgcctgcagtgcaggagacccaggttcaatccctgggttgggaagatagactgaaaaaagaaatggcaacccactccacttgcctggagaatcccatggacaagaggaacctggcaggctacagtccctggaattgcaaagagtcagacacaacttagcgactaacagtttcacttt

SEQ ID NO: 570 - DNA, 501 bp, Bos sp.
gtgaaatgagaagaggagtatgaaaaggaaagaatggctggggtaaaaaaaaaaaaagagagagagagagagagataagcaaaaaaggtgtgtcttagaggcctaagggggaaagtgccaaaggagaaaaatgttttagaaaggaaggattgttaacaatatcagaaggtccagagaaatccagtatgattaaattctgaaagggtttcactggatttgacaagtggaaggccttgttgctctgccagagygctagaaaagtgaaactcaaatcctgctcagtgctgattggctgaatccaccgggcctgattggacctggccagtcagagggtaggtgtgcaaaggcaggtcacatttactgtcccttatttttctaagtagatattaaacagttggaaagatagcaaatgaaatttccttcaaaacatatctgttccttaaaaatggctgaaaatacaagttacattagccaagtatatacatagcaatatatatcagt

SEQ ID NO: 571 - DNA, 501 bp, Bos sp.
tgtaatggtggcctcccatctctcctttttctgggaatgaaagaatgttgaaagtgtttctgttttataatgtaagaggtggccaagcatttacaactctatatactcctccagtggaattcttctaaacctcagacctggccagcaggtttctcccagacgattttcattttcataacattcacatccaataaactgcacaaaacatagtgtgagagaaaaaagggggacaggaaatggctctgttgcayggttattacatcctattgcctgtgggttgcttgttatgagttttaactatgtaaatatgacgtatatgacatcagaatttaatcttaaagcttctatgtgggagatagagtgtgactttattgttagggctaaaatcaacctggtgttgacaggtctcaaaagtcactgagtaaaagcttaaaaagaaaaagctcagactgataagctgttctttgattgacaacttcaggcttgactgccacttttgaa

SEQ ID NO: 572 - DNA, 501 bp, Bos sp.
tctccatcactcacacctgtgctcttgttgttcagtcatcaagtcatgtctgactctgcaaacccatggactgctgaatgccaggcctccacgtccctcaccatgaacctctgtgctcgtcacacacaaatccatcctccaccctggattacccacctttggcagatgtgtaccctctcagcaagagcttgtattcagtttgtcaaatcctaaatgcagtgaacatcacaatttatctttctgggctggtmtcttttctcccctctagtcctaattgcctactaagtgactgatcctggctgagaggttgctacaggccaggtcctgctcctcagaccctgcaaactctccatggtctgtcattcctcaaggctcttgaatacactactccttttccaggagtcctctctcccttcctctgctgttaggtgcacgagggccatgccacctcctctgggaagccctcctagattcctccaggcagggccgcctgccatactt

SEQ ID NO: 573 - DNA, 501 bp, Bos sp.
ctttaagtgaccaacacttaatttgaagaacttccaaagctacagaaaagttttgagaacagtacaaggagctccctcatcctctgccttctccacacatgccccatcacccccattagccgcttccctgaccaatactttgtgccaggaggggaagggaagagaccagaggagatgggaggctctttgtgttgttttcaatcaaagagtttcccagttccctggagagtagaaccttaaagaactcttcygtcctgagaagtcgcctggtccttcttgacaaagcccagaatgtagcaggtcttcagtaagtcactgcccagtgaaggcatggattggtctcataggatgacgtcagttctactagtcacattcttttaggacgctcgagagaggatagaaagcatatgaagctttgggtttctagggtgggtggggatgacaaggtttggagtccctcccacctgttgttctaggttgataacagattcaagaaggatt

SEQ ID NO: 574 - DNA, 501 bp, Bos sp.
tctttaaaatgcacaaacagctcatgaagttcaatatcaaagaaacaaacaacccaatcaaaaaatgagtggaagacctaaatagacatttcgccaaggaagacatatagatggtctttatgtaatctttattatgacaattctatttgacttaatactgttcaattcacccattttaaatggttttaaggtctgcagaagactgggagagagcagtgtgagccgtgaagcttgtgcagaggttaacagayaagaacagagtaggggaagtggaaaaggatgtgctaggggtcagctcgccatctgattcctctgtctcccacagtaacttacatatgcattcagtacatcttgactataagattaaggggcaataataggctcatgtggcattttattacttcaagtataaggccactgacaagaagaggagacagactggcacaaagccacagagagaacagaaggcaccctgtttctatgataagcatttgctatgta

SEQ ID NO: 575 - DNA, 501 bp, Bos sp.
cacacaaaaattttgcgaagaggaccacagaaaaaaacttgtgaggggttgtatcaagagacaaaactcactgcagaggaggtaaaaatgagagaataagataacaggaaaatatggaaacttggatggagaccaaggatatcaggctgtgaatttcacaagtgtccacaggtttgccaagagaattaattgttagagtcttcaaggtctgccacgggtgaagatggaagaaacaggaacactcaacagayagccatagcttcagtgattcaaacttggaggacttttagtttggggtgagcagggtgctttggcctttgtggaaggactcagctgtagtttggtttaattgccccgtctccagactggggctctggttccaagatggtcaatgtctgggatccctggcagtcattcaaggccttgttgtttgggccaagttatcctatggtctgaaatgtgctttgtgttaagtcaactgttgttatattcttatgggta

SEQ ID NO: 576 - DNA, 501 bp, Bos sp.
ccatgcccacctccaggggctctttcaatccagggatcaaacctgtgtctcatacatctcttgcactggcaggtgggttctttaccgctagcacctcctgggaagccagatcagcgtagccccatgatggtggaatttaggcttgtttagatggccctataatgtcacagaaagagaagtggagttggaatcagaaagccagagttcaggttctgattttgtctcttagaagctcatggtcgtggttggawaattcggtatttcctaattgcccaagaacttaagtccaccgcctctccctgctccccaaaggtatggcagttgaacttggtagtaaaggagagctgtactgttggatggctgttcaaacgatatggggggttatatcggccgtaaaataccagctcaggtgttttgcttagattagctgactgcccttatgcacgtatttgtgtgttaacacatgtgtgtggactcagctcagtgctccgtaaggaccta

SEQ ID NO: 577 - DNA, 501 bp, Bos sp.
aaatgttaatatgtctcactatggttatatattttttcttttctcttatatgtcttctgatttttatttaatgtatctttgctgttaaggtgtctaatggtttatgatgtctatcttttttgtgagttgtacctttatcatcaaaaatattcatctttcttttgtttaaaataaataattttttttaaaaaagaaaaattgtgcgaagagtttgactcaactctgacagctcaggtcaaacaactggtggygcttttatgtccatctttccttcctccatccctccttccttccctctgcatggggttctattggagctccaagtcagtactccaccgagatataatgtacctgcaatgaagtggacgggtcttcacgaacagtttgatggtggtgtaaccttcacctgggtcaagagaagaacacgtctctcatcccagagagacccctggttccattttcagtcacttactacttttgaactttgtataaatatctggc

SEQ ID NO: 578 - DNA, 501 bp, Bos sp.
agtgaagattttagagtcaatttgggtgtggaatttctgactccatcatctactacctgtaccttggcatactgttacctatctcatacaccaaaaccttttttaaattgtgaaagataatatagagatgccccaaattaaatgcctgatgcacaggaaaagttcaaaacttctctttctccattttctctttctctataacagtaaatggaatttggaagggttctgtgtttcctgagggaaatagtgaygtgcttggtacaagagaggatgataggaaaatgtcccatagtttaggtccccttttcctaagtcatctggaccacagcccatcttgggagtttgattaatacagaaaaattaaaaggaattagtcggtaccttggtccttcttggaaggtccttctctgaagctccctaactaggtgtttcagactgatttcagaactgcattcccagcagggctgctgtagcctaatatgacttaaggtgggatatttg

SEQ ID NO: 579 - DNA, 501 bp, Bos sp.
taaaattccttaaagtttcataaaccacctcaaactgttgtagaagctgtaaaaatttgatgaactcaaagcactctgtgttcgcagagccccctggacgatatcacgtttactttcagactttatttccaccctgaacctttcccctggtggctatttgctgatttctcaggccaggatgctaggagtggaaaaccatttgagcagatccgtgcgtgtgatctatggtcctgatggtgtggtggtggtgktgttcagtctctaagtcatgtctgactcttcgcgaccccatggagtgcaacactccaggtttccctgtccctcatactcttagagtttgctcaaactcatgtccattgagtcgataatgccatctggccatctcatcctctgttgaccccttctccttctgccttcaatctttcccagcatcaaggtcttttccagtgaatcggctcttctcatcaggtggcccaagtattggagcttcagttttagcat

SEQ ID NO: 580 - DNA, 501 bp, Bos sp.
gagtttttgttgtggttgtgttttgtttagggtttttgttgttgttgtctgtctcactgtgtggcatatgggatcttagttccccgatcagggaatggaagccacatgccctgcagtggaagtgcagggaaatgcagtggagtcttaaccattggaccaccagggaagtccagtgtgcatttctggttgagacctagtcctcccactcatgttagcagaataacgcagggatcacagcagagtcagtgctrtattgagaaaagttatgaaaggcttggagctgaaataaagaaggaccagttgctaactagagacctctgccctcccaggggctggagagactaggctggtttgccaggttctatcatgagaaggtctaagaggaggacttctcctctggggagaaaagacaaggttttacaagagagactctggtttcaggacaggcctcctatccaaagttgagggaaaggaactcaatagaaccgctccaagctgatg

SEQ ID NO: 581 - DNA, 501 bp, Bos sp.
tcactagctacctggaaggcattggaggcactaagcaccattggcaaccccagttcattttgagtttctaagggagtggatgaaaaataaagctgatctcgattccatttataggacagatttgcagaaaagtaggaaaatggttgacaccccatttcattctggtgacatattggagctgcttgctcataacagtgttgtaagtgtcctacaaacaaggcgatttgcactagcaaatgatatgaatgtcrtagcccttgtgcctgactacagtgggaattccgaggaactatcttgagaattcccaaagctattttaggctaataatagaaaacccacaccaagcacagtgttttagtttggacaaaggttattctaccttaagcagtggctgaaaggcagtgattgatgtttccccatcatgaagcacagcatgttagttccttacttcgtctcaaatttattgtcacgggaggacatttgtttgttacagtatgccaa

SEQ ID NO: 582 - DNA, 501 bp, Bos sp.
  polymorphism (251)..(251)
  misc_feature (468)..(501): Nucletides uncertain from position 468 to 501
gctgaagtctgtccccagtaaactttagatttattgcttgccaaagctatttttgaaaatgtgcttccaggagtgatgacttcaatacccatagaatccacgtgaacgttcagtttattccaggtgaaatgaaatgagactgcttctgtgatgcttttacacaaaaggaatgacccatgattggtagaagtttagactctactggcctgctaggagaattatatatggaaaatggatctttcagcgctatytctacatccactttgagtaaagaacagccagctattcagctaaaatactgttggtttcatgtacctacagaattagatggtcaaagattaagaatgaatttgtgcataaaacttcttgacattcttggaattcaacataaaagataaaacaataataagtaaatcaagagtagccagtatccactgatggagagcttaaataattatactacaaaannnnnnnnnnnnnnnnnnnnnnnnnnnnnnnnnn

SEQ ID NO: 583 - DNA, 501 bp, Bos sp.
tcaatctttccaagcatcagggtcttttccaatgagtcagttctcatcaggtggccaaagtattagagttttagcttcaccatcagtccttccaataaatattcaggattgatttcctttaagattgactgatttgatcttcttgcagtccaagggactctcaagattgcacttacacaccaataaaaatgagaaattatattaaattaaaataatgaattaaaacatttgataaaagcatggataccatkgcctctgagcattttgccagaaggaaccagagagctgaagaaagtatgtgatttgaaaattcatctaaaatgatctaaatgttaaaaaggaggaggaatgtgagagacttgaatgtcatgaaagaaatttaaaactagctagaactatcaggttttagctatgcagtttcagtaaaaaaaaaaatcagtcaggtgtgtgtgttttttctattcaatgccagagacaatttatacaaaagcactttgaaaa

SEQ ID NO: 584 - DNA, 501 bp, Bos sp.
ggatcttttggggaaaaaaaaaaaaaaaaagtggtgattcatttctgtgctgcgtatgggatctaatttcagtccaaagaaatgagtgattattgacatcatcatctactatgttgtgttccctaattatcctgaatgtgtcaattgattttcacctgcaaaattcagctcttacaagtaaatatgctttaggtgttgcatgtttaaaaatttggaaagcccccttccttcttgaaattgagccttttctstgcttcacatccacagacactgtaaattctcttcagctctctttcagctgtgtctactgactctgaggggagctcttctccccaacagggggctttggaccatagtcattagaaggacacgagcatccatctaactctgccagctttgagcttagttttaatcactgttaatgaaggtaatgatttagtgggtggaaagaaatgagtatcacaaagaatgattagaccttacatgagattcataaccaat

SEQ ID NO: 585 - DNA, 501 bp, Bos sp.
ccaccaaagtgatctcccccacctttctgaactcctataaaaattattgcctggcaattaatttgacattcatatgcaaacttgtaccatctcttgagttgttgtattgagctataatttgaacattttattgttattaaacatttcacatggggatttatgtcttgttttcacaaccattctgtgagctcattcattcatgcagtaagtactcattgaattatgcaccaagcattgtcacatgggttgcytcatttaatcctccctcttctctgtgattgttcttgttcagaccctactgtgtgtcacaggcactgtgctcagtatagtgtatcattcgtcctcaaagaacaaaaattaagtgccctgaagggctgcattagtgagcctggtgagggaagcagctgattgcttagagggagggagtgtgtttacacagggcacctctacatgacggggcagcttgtacatctgagaagggccccagtgagagggtgagaa

SEQ ID NO: 586 - DNA, 501 bp, Bos sp.
gaataatacaagggcattaaattagacctcattacctagccagttgggccgtccagctctcctgcacataataatgaggtctgatttattgtgatcattattcaggcattacaggtcactaaataacatgctctgcccacacatgtcttctgagctaataaatatcctgagaggaaacggtcttgagggtgtgagtctcaggtttagatcagtaactgcaggctcattatgtgtgaaggtactttgcctaytgctcacaaaatcttgggagcagagatggcaaaagtctaattaataacctgggggttgtgagtgagagatgaaggagggcatgtccactggattctctggcctatggggcgcagcataccaaggaggtatgctggtgggtgggtgggtggaacagagccgtggccaaacaggcgagtcagccagggccccaccccggcaacacagcatccagaggccaggccttcttggagttggctctgcttttctctc

SEQ ID NO: 587 - DNA, 501 bp, Bos sp.
taatattctgagccctgtactgtgagctgtcttacagatgttgaaacctaaggtggaaaagttaactacatgctgaccagactatagctatgacacaagctgctgcagttctgagatttggcctcaaagaagtggcaacaaactggaactgaagattaactgtacctaaaacaagatgatgattggtcatcagaccaccagggaccaatttgaagatgactgtcagagctgaccttgctgtttctgcatgyatccctctcctcctattaatataaaaagttcttacccactggctgtcagtgcggggagtgggcctttggacagatgtccaccctccccacccccaagttgccatcatctgacataaatcagacttcctttcccaccaacccggcttgtttattgacttctgagtggcaagcagtggcccccaccttccagtaacatcttcaccagtcacatttccatgccttggtcctgatactgctgttgtttcagaca

SEQ ID NO: 588 - DNA, 501 bp, Bos sp.
ccaagttcaaggactggagaaaaatgatatcccaactcaaagacagtcagatacagagagaaaattctttctaattcaaaatttttattcaatttagtccttcagtggattgaataagacccatccacactgaggagggcagtctattttactaaacctaccaattcaaatgctaatctcattcataaacaccctcacagacacatctagtttgttaaccaattatctggatacctagtggcccaatggaraggaggagacttaaaatcaaccatcacaatacctgatacattatagaatgtcagaaaatgaacaaatttagtgacagtgtctccttgcacttatattcaatacccactcactagactctctggtttccaatgtcaccactccagggtttcaaatttccttcctttcctttcaagtttttcttcaaattttcttgagtacccactaggcactactgtaactgattggaaacaatgtaactactgtataaca

SEQ ID NO: 589 - DNA, 81 bp, Bos sp.
gagttcttgagctttgccgaaaggtaccctaccatcgtctataacatcctyctctttggcctgactagtgccctgggccag

SEQ ID NO: 590 - DNA, 501 bp, Bos sp.
tatatcaggttttgctaaatgttcatcacattatatcacaatatatcatattttcatcaaatgtgatttggcctactgtatcattaaaccattaaaatattataaaacaaatatagtaatgttctcattttattatctcttactcttcaaggcatattagaacacttaacagtctttaactgacagttgagctataaacagttaggaacatatgaaggacccaagtacgaaagggttagtgatgttccaaygacatggagcccatagactggtgtccctggaccaattgcagaatcactgaacagaatcactaaaggctttttttaaaatcacagagccttgagtctcactccagtataattttttaagacttaacaacttttaacaacctctgcatgttatctttctgcatattaaagtttgagagaataaggcaagaattcttattcttaaagcaagatcaccttacttcagtgatcgctgaccaccagtatgtcagca

SEQ ID NO: 591 - DNA, 501 bp, Bos sp.
agttattcctatgctttgctgccaccttggcaaactagaaggatttacaacggaattctgtacccagcgggctggaaacagcgttcccattgacgaggcgggctggcctggctcagagaggcggttgaaacggcctttatgcagcagagagaatctgggaacatctatcctccggtggatttcctctatttataataactcgggttcggcaagattcaagtgttcttctctgaatggcttttaaaggctcrgtctctcttagttcgaaatggagatggggaaggaaggagtcggttggggacgtctgagtgtgcgctctgagtggccctttgggggccgacgctgacagcgaggcgctctgttctccgttttctctcgtctaaccttccattccgcctccatgggatgactcgcctccaacttcagttaacttcttgggagtccggagcacttactggaagatgtttacaaaatgcgaagcatctgggtggccaaggcgga

SEQ ID NO: 592 - DNA, 501 bp, Bos sp.
atagcttttagtgagactcagtttcctgttttgcactcatgatgaactgtggtgcctttactaaagcagggaatgcaggatgaagggtagcttggctgcataggaagtggagtgaaattaaggagtaaaggggatgagttctgtctttgacatcctggagctattcatgaatacctagatagaatttttcagtataggcattggatacaaaggactagaattcaggacagagaaaaaggtttgaacatcaytggcatgtaggttgtaggtcaaagccatggaaatggataagatgactcctgaagatcagtgaaatgagaagaggagtatgaaaaggaaagaatggctggggtaaaaaaaaaaaaagagagagagagagagagataagcaaaaaaggtgtgtcttagaggcctaagggggaaagtgccaaaggagaaaaatgttttagaaaggaaggattgttaacaatatcagaaggtccagagaaatccagtatgatta

SEQ ID NO: 593 - DNA, 501 bp, Bos sp.
tcaaatgatgcctatgatgttgctgatgctgaacaaactcctgtccaggcctaccaaactgacactcagtacaaaataagtgaaatatatgatgttccagatgtctcagtttctagagtcatcccaaccagtggtccatttatttctctcccaaatactcactcttttcttaatgggcccagaacagattctgacatagctgtggaaaacctgtatactttttgtcatttaaaggctgtgaacttggatayccagaagagagtgattaagaatagtggccttatacagggttgccagaggaggtcacctttttcaaggcattattcatgtaatgcaaatttataaagaaacatagtcacttaaacaatttcctagatatgctgaccttcagtctttgtgataccaatttcccctgaatatttgttactgccaatgcactgcatttcaacagtgattcttgtgaccttaaaacagcccttactctcctggaactgctggcta

SEQ ID NO: 594 - DNA, 501 bp, Bos sp.
gctttttaatatcttgtccaggtttgtcatagctttctttcaaaggagcaggcatcttttaatttcatggctgcagtcaccatccacagtgattttggagcccaagaaaataaaatctgtcaatgttttttcactttttccacttctgtttgctgtgaagtgatgacatgttattggtgtttttattatgactctctcaccagaacccagatggccctggactctgcacacacacagccaattgttccctrcttctatttatgtggttgtgcagggtgatggctcgaagtctcatgtccttctcagctttaaaaatgatccttggataaacacatttcagagagaagggggagagagaactatgggggttcatgtcacaacacttagcagagaagagcatttaaatggatggttatcatcagagtcagaagttgcatgggccaagctcagagcccagactcatgtctgcatgctgaaagagtttactcatcactgtgttaa

SEQ ID NO: 595 - DNA, 501 bp, Bos sp.
cacagtgattttggagcccaagaaaataaaatctgtcaatgttttttcactttttccacttctgtttgctgtgaagtgatgacatgttattggtgtttttattatgactctctcaccagaacccagatggccctggactctgcacacacacagccaattgttccctgcttctatttatgtggttgtgcagggtgatggctcgaagtctcatgtccttctcagctttaaaaatgatccttggataaacacakttcagagagaagggggagagagaactatgggggttcatgtcacaacacttagcagagaagagcatttaaatggatggttatcatcagagtcagaagttgcatgggccaagctcagagcccagactcatgtctgcatgctgaaagagtttactcatcactgtgttaattatctattgctgtatcacaatttacctagaaacttagtgtcttaaagtaacaaatatttatcatttcaccatttctgtgggtt

SEQ ID NO: 596 - DNA, 501 bp, Bos sp.
aactagcacctctattagcctaagcaataagtcaacattttcacaacaggatataatctctggatataacagtacctgtcacaaaattgcgtactaaaaattcaagtgataaagtcaagaaaactataggttgatatactctatgatttcaacaacagtaatccattaaattcacgtatactttctcaatttatacaatgcttttatgtgtgttatcttatcagtatcccacaataccctatgaaagaggkagatcttaggacccctttcaaaatgagaaaactagtgtttaagaaaattaataactcacctcaatgacctcagcaaatgtcacgtgctcttccactctaccacaatcatctcaaaaatcagctgcttcctaactcaatgtaataaactataaccatcccccccataccttcacagtgttgtgaatttcagaggtcattaggtttctagccgcaacgatcacatcctgacacttcttgttagcaaaatgag

SEQ ID NO: 597 - DNA, 501 bp, Bos sp.
ctccccagtgtgtctctgtgtgtcctgcccatcctataaggacatctcagtcattgggttcagggaccatccgaagtccaggatacttaactaattatatctgtaaagagcttatttccaagtcaggtcacattctgaggttctggatggccatggatttttgcagggttgggggagtgtctattcaatcccgtgcaagtcacaggccctacgatgatattgagaagaacaaagacacagttaccaagccyttgtatggttttgttcagctcccagtcacaaagctgtttataagtaccttgacccagccagtaatctacagtactttttccagctgtttgttttggcgttgcagggatgcttgtctcatgtagaggatgctcagtcccttgaagaaaccaaattcctggcaccactgccagttgagggcacagtgcatcttccctctagcctgctacctcttcacgggtctattccatttctgcttcttgaagatactca

SEQ ID NO: 598 - DNA, 501 bp, Bos sp.
ataaacatagacacacatgtatttgcctcaaatctggcccaaattattatacaaatggatcttcatttgttcccttcactcatttttatttcctttatcacaaaaaaatatccttgaatcttagtatttaacaacaactgtcaccattttttattttctagttggaagtgttaagattcagaggagaaatctatcttctaattgtaaatatctttatgaaaaagtacttggagccctgttgaaacacttcytactctttattggttacctcagcctgattgatgaccatcacttcttctggcataaatgttgcaccttttaaatattataaactacattgtatagtcctttcttttataaacagtatatctaggccaggcctggcacacattcacagactatgtaattcctgggcatgtgtatcacttttaaagactggagctgaaaagcattgtgtgtacttttggcatggggattccttgtagagtatgtaaatttccc

SEQ ID NO: 599 - DNA, 501 bp, Bos sp.
agtgcaaagaattgatgctttcgaattgtggtgctggaggagactcttgagatgtgggttatacacacactaaaatattatttgttgcttgtgtgaaatgcaaatttaactgggaatcctgtattcttattcactaaatctggcaaaccaattgctgtaggcctcactgcagtcttaggaatctagagcacttatcataacaacacaggggttagatggcaattctgttgtaacagctttacatctgtcasagtttagggccaagtgaatgatccaaggagaaacaggagttgaattgctcgaaaacatcagctatgtgggtgttcgcaagccctgtaggctggggtgatcagggaaggctccctagagaagacaggctgggaaggacgaggatggagaaaaacttcagaagctgtttcatgagaaagagctgaagttgagatgaactagacagtgtgtattgtgttcagcggatgagtttttatcagaataggaccattt

SEQ ID NO: 600 - DNA, 501 bp, Bos sp.
tcccatgtacagaggagcttggtgggctacagtccatgggttgcagagtcacacatgactgagcaataaacacacacatatacaatatgtaatcatagtctcacacacatcatagtatgtatcatgcttctaagctctatattcttgcttacaagagcatgcacaggtcaatctgcagcccaaagcattcataaatacaaagccatacagtcagagctaggagaagccatagggccattggaatctgatckttgtgcctttttaaagaagtccagagaggagagggtcctgtggagggttccagagctggttgatggcacagcagagactagagctcaagtcattcgacctggagtccagcatgcacatggccttcagttgtatcttatcactgaggccaacactttcttccttcttcagagtccaagcatgagtatgccaagctgaggtttggattaaagcataccatgagatttcacaaggctgacgattgtctaggaa

SEQ ID NO: 601 - DNA, 501 bp, Bos sp.
aagagcatgcacaggtcaatctgcagcccaaagcattcataaatacaaagccatacagtcagagctaggagaagccatagggccattggaatctgatcgttgtgcctttttaaagaagtccagagaggagagggtcctgtggagggttccagagctggttgatggcacagcagagactagagctcaagtcattcgacctggagtccagcatgcacatggccttcagttgtatcttatcactgaggccaacmctttcttccttcttcagagtccaagcatgagtatgccaagctgaggtttggattaaagcataccatgagatttcacaaggctgacgattgtctaggaaaatgagttttacaaagacagattctattttaactgcattaagatgtctggccaattaaaggacattagaggttagcagttcttataaagtggagaatcattttataaagtgaatacccacctcttttgcccattgagattctgtcaaggttt

SEQ ID NO: 602 - DNA, 501 bp, Bos sp.
atgaacaaaaacaccttcaaaagaacaaagagtcacaattttatagatcaaagaatatatttagggcttggtttttagggatattttccaaaactgggtcacaatatgccccagcctgagagacatgaggtgacagagtccatgctttatcccaggtggatgagaaagaggggagttagaaaacttcctatgtcatttctgaagttatcctgggaaggcaggtgtaaaaagaaattgacatggcccaattyagattcacccagactggatgaagcagaaggagttccttttattagttattgttgcagaactcttaatcagcttaagattttgtggatcttttaaaatcattatcacagaaacacacaaacaggtcctgtggtttaactatctgtgtgttgaggagtgggactgggtgagcgaggctgggagggtggtccgtaggactgagctcttgggactgatatttacttttgacccttggcccttcaaactgccctg

SEQ ID NO: 603 - DNA, 501 bp, Bos sp.
cacaaaataagattatgagaaatcactgctaagaatgaaaaataaatgattgtgaataattcagaacaactaagcttgcatacaaatgccatcctagaactttggttagaattacaaatacattacatgaaatatactagaaatgtgagaggaaaacattaaatttagccaggatttaaatggcattgaggctgcatagatacttaagctactcaggtagtgttttttcctctatctctctctgagccctktcatttcctgatgtatctcaaaaggaaaagctcagagacaaaaataaaaattgtccttattatgtttttaggctatttgaatccgaagggggcaaatctaggagagcaggcacttgattataagttccttgagtgaggagtaacattttatcactttacatccccaaagatgtaacttgtgcagtactcatcaattatttattgacagactgaaagactgatgcttgtcaagactacttttatttctatt

SEQ ID NO: 604 - DNA, 501 bp, Bos sp.
aacggaagtaatcgattaaaaagtattgcaagaaaagcttggtaatgaaaatatctaaccatccacataagaagacaaatcattatgtttaagttctttataaaagaaatggtctattcttgttaggcaaagttgtttttcttttttttcctaacacttgacacaacctaatactgaaggcttagacaagtttagttaaatgaacttaatttctcattagttagttaaggatcatggtgtgttacctcccrgtatgaaccctcatttccagctatcatttagttgtgctttgcgttattttccatgctaccatctgtcactgggctacgatctcatcaagtttccaagtccagctggatggacttctaatggcccccattctaacagcgtctaacagtttagaagtgctgatgatggtgaattatggtcactttgcacagaatcatttctgatatataatttttttctaatcttgatgtgataggtaacatctaacacact

SEQ ID NO: 605 - DNA, 501 bp, Bos sp.
gtcattacctctcgattattgtaatgagcatccgagtagtaatggcctggcaaattgcttttgtgcctgtgtatttagtagggtcctcattaaagcagccaaagcatcctccaggcttgcatccaagtggcaaatcaccagcatcaaaagaacaaagatgtgggcaatgaacgtttgcaggcaggggagaagaaaggaagggagggagggagagaaaaagggaattccatccagtgataagatctcagacmtcatttggtcagcatccaaagaggacatgagcttgcttggaagactcaccgtgggtttgcactttgtctcaaagccagcctctgcacaacaggagaacaagttatctgaacgtcaaagaatatctcacacttgcagcaatatgaatggacctagagattatcatcaccagggcttccctggtggctcagatggtaaagaacctgcccacaatgcaggagacccaggttcaacccctgggttgagaagatc

SEQ ID NO: 606 - DNA, 501 bp, Bos sp.; identical to SEQ ID NO: 34

SEQ ID NO: 607 - DNA, 501 bp, Bos sp.
cctcagaccatcaggcattagatcccagaggttaggttggggacccctgctctaaagggtctttggaaatgcatcatgtattcccgccatctccaaactcagttgcacgtgagaatcactcttaaacaccagtgatagggtgccaaccctaaggttttgatggagctgatttggtgtgaagctcaagcaggtctagctgggaaaattcctccagatggttaagtgcacagtgaaagttgagtgaatggatratgtccacagttgctcacaggacaagcatgctcctttcccttagtaactccctattctccggagacctgttgaacccactacccagatattcttaactccgtctccattctctgatccttggccccagttagcatgcttgtcacttttcacttgggctgctacagaaacctccctactggcttctgggcttttaacacaatcccttgtcaatggtccatccatctgccattctagcctccctagtgtcct

SEQ ID NO: 608 - DNA, 501 bp, Bos sp.
ggccctaggcctattgagccatacctgctgagtaggcacagggcctattgagccatacctgctgagtgggcacatgtgcccacagtggtgattctcagagtagggtctccagaccagcagcatccccatcacctgggaatctgtggggaacacagctcaggccccaccctggaactgatgggtcagcaactctggggcagggcctctgggatccacagggcctccaggtgatgctgatctgaatttaggartctggacagaaagtttccccaggcctgaggatgggtctacaagcttaattcgggctgatgtaaattgcctggccatcagtccgacagccttttcccaaggaatgaggtgtccgtctgcattcaggactggtaaggctagtagctgtcccggcgtatcaaccctgtcgggtgatgaagcgctattggacacatgacaaactggaagaggtcgtacctgccaggcctcctggtgaaacgctgcgtggaactg

SEQ ID NO: 609 - DNA, 501 bp, Bos sp.
tcagggcttgacttggacttctggggcttgctttttgatgatgtgaaggtcacgtgaatcagcaactatagcagatcctcgctgtataatttcctgtgaagatttcctgtgaccctgtcagataaatgaggttttcaaccactggtggtcataaaacaggagtgctccatgttttctgtttcttgaatcagactaggtcgttacatgccctgcattttggttggagtttttaacttccatatgctttgggyttgtgttgccttggacataagggcatttattggtgttccgggggcggttataatattgggtgggtctggaagcatctaagctggtttccaaaggagaagacagctctcccacaaccgtgctccccagagatcttagtcccagcggaagcgctgtgggaacctctgggcttgaatttgaagaatgaagacttgtggactttgtgactttggttttcatctttccttcactttctgtatcactctacttcct

SEQ ID NO: 610 - DNA, 501 bp, Bos sp.
cagtgggagacattgtacattttttcccttcccaccttcaacagttcttctacaaacctccaagaaaaccttgggctttgaaatccatgacacttgtgaatccctccaaaatgaaaaccccatggtcatggataaaaatcacagggtacaatatcacactatgaagccaattcttgtggttaataaataattgatactgtacttacacttcctggcttcaatacagtgctcaccaggaattgtaggtcatyattttccaactgctagatgctgggtttgtgtgagtgtgtgactctgttgaataagccataaacgccacattcccactctttctcacaccagtccaggaacctcagcaaggccccaggcctgctccctggtacccaaatgtatgtctttctccccactgtcagcaacctggtcccagcccgtcacttcccccagaactattacaaaggcttctgctctggctcctcaccctcctatgtctcattatctgga

SEQ ID NO: 611 - DNA, 501 bp, Bos sp.
tattgatttgatgatcatggggcccatgtttattttattttatttatttattttttttgagatgtagggtgtggctcctgtcagcatctatgtggtcctggacaagtagttaaccaaactctcagtgtctagtggggatggcagctctagtttcataaggcggctgcagagaaatgagtcagtgcatgtgaaagacttacctatatttccacattgttggctatcactaacgttctccacttcaccctcaycaccacagaattttgttccttctttcccgggcattcctaacatctttcttacaacctttctttgaaactcaagccccctgatctcatttccttaaactttgacaaagatgatagctcttgagttcatacctgattttattcttcagaggtttgctatgtccttgaggctggatctgagttgtcttcattcaggttgtctctaagcaaaacccggctatatgatgcagctttcacctgactgaccagatgc

SEQ ID NO: 612 - DNA, 501 bp, Bos sp.
tctgttattgttcctattccttaattgttgttgtttagttcaggtttatgaggtataatttaaatttagtaaaaattaccctctttctatattgttaaataaatgttggccaatctgttcagtcatgtaaccaccaccaccactatcaagatagagaacaaagccatgggtacagaaaagtccctctagccctagccctcaggcccctctccagcccatgacaaccactgatcagattcttgtccttatastcttgccttcctccagaatatctcctaaatggaatcatgtggtccgtgtgtggcccttttgtgtctggcttctttcatttaatataatgcgttggaggggctcaccagatagctcagcagtaaggaatccgcctgccaatgcaggagacgcaagagatgggggtcgatccctgggtttggaagatcccccggagaaggaaatggcaacccactccagtatttgtgcctggagaatttcatggacagagga

SEQ ID NO: 613 - DNA, 501 bp, Bos sp.
tccaaacctgaatgaagcctttccacttcactgttctagaagacacggaaattcaagggaaaccacagccccatgctcagtgtggttccgcaaagtcttttctttttacagttctgttcatcaccgcctagtgccaaaagaaagcttttgcttttctctctcctgtctctcctctgcctgaaaaactcatttgcattaggtcttaaacaatgctgttggctcatttctcataggaaactgtggaggatagraactagctttttctggagcctgccaatgtctaaatcaaaacttttcctctggtaataggcggtcaggatggaccttgtccaattcttttttacttccaggacagttggtgtctgtgcctcccgtcctgcttttctaaacaacttcctcttggagaaaggatgacacctatgtgtgcatactgtttcttttctcctttatccgtggcagacatttctaatcaatcctgacattccatttcactgatcctca

SEQ ID NO: 614 - DNA, 386 bp, Bos sp.
aacagaagagaaaggggtgtccacaggcactgatgacattaaccttgccttgtggacgtgcaaactgttactaaggaggttatgtaatgtgcttaagattacagagttcatatgaggtagaactatgtcttaaaccgtaagcccaaaacagcagtttttctcatagttttgcacatggcaggttctgtgtaagttttcaatgttactggtttgtaacagtactagttgagcctcaattaacttctctaatrctaacaaagggcttccctggtggctcagatggtaaagcgtctgtttgcaatgcaggaaccagagttcgatccctgagttgggaagatcccctggagaaggaaatggcaacccactccagtactcttgcctggaaa

SEQ ID NO: 615 - DNA, 501 bp, Bos sp.
gtattataagtaacccagagatgggaagatatttataggttatatgcagatactacaacattttacacaagggacttgggcatcctctatttggatatccaaggaagttctgaaacaagtgccctgctgatgccaagggatgattgaataatgcatgaaaaatgttttactagaaacaggtgaatccagggtcacttatgaccttcttcagggaattctaaatccaactgaaaatggattagaacttgaarcagtgatgctccaccaccactgggcccactgagagcatttggtagcctgatgtgggcagagttttcatcaccccattcgtctctcccttttgtcccataacacatgaaagtgtgttatttttgccagtctaaaattttagaatttatcaattacacagaagttagaaattacaaaatatgatcttgacagatcaagctggttatttttgtagcaagctacatcactgaaagcagaactactcagttattc

SEQ ID NO: 616 - DNA, 501 bp, Bos sp.
aggcaagagtaccggagtgggttgccattgccttctccgactatttcatactagctatatttttattcattcaaaaacccttaatgattactgctctagaatctaattatgaaaaaaaaacaatattgttgttccttttcatagttttatgtatggagagagtaatagatatataaagaaattgcaatgtgattaagtgggatatcatattgccatttaacctttcactcaggtagttgtttaggaaatgratttggcagataactggggcttccctggtggctcagacagaaaagaatctgcctgcaatgcacgagacctgggtttgatccctgagtcaggaagataccctggaaaatggaatggctaccactccagtattcttacttgaagaatttcatggacagaggagcctggcaggctatagtccatgcgatcacaaagagtcacttttcagttttctagaggcaacagtttctggtagaaatctcagtaacctta

SEQ ID NO: 617 - DNA, 501 bp, Bos sp.
ttgatccccagtcagggaactaagatcccacatgccacaactgagtgttcacatgttgcaactaagacccgatgcagccaaataaataaaaatacttttaaaaaagaattgcaatatgccacgaaggaggaagatcagctgcactaagagacttaagacgagggttaccttgaagatagtggcggagaccactctgcagaggtgatacatcatctgagatttgacaccaaatgaaccaaatgaaccaagayggagatgctttcctaggcagaagcagagcacagttgaaggctctgagatgggaactggaaatgtataatttcttcttatacattaagtagtaatttaaaatgaaagaaagaaaaaaaaatggcaatacaaaagcccaagactgtcctgctattcaaaatgagctcatgaaaatgaaacttaattcactatcacagcgtcaccttggctggaaaggaagtggccttatttataactcaaatcaaatacctg

SEQ ID NO: 618 - DNA, 501 bp, Bos sp.
gggtcgcacagagtcgaacatgactgaagcgacttagcagcagcagcagtagcagcaggaagccagcagctgggagatttttcccaataatgatgcaatggggggaggggtgtagaaaatgagtggcacaaattttcttattggctttgatgtggctggtttcacactcacctggggacctgggattcaggagcctcttaaccattttctggatttcttacaaggggaattggtctatacattgttgttgrgggaagagggtctggggcttcctattctgccatcttgttgatgtcatctgacatcccacctaatgagatcttagtgattcatccctaacactgctttattaattattattattaataatagtgctttataattaataaataacagtgtgtcagactcactcatatatattaatagtgttttataatagtgttttagattcacgcatatatatttttttgtctcactattcccttttgtatctcattcttt

SEQ ID NO: 619 - DNA, 501 bp, Bos sp.
ccaattcatctgaattttgtccatttctagggctttttttttccccaatagtaacatatgaaggaatgggctgacctttaatttataatcctcgtgtcacggagtttagccgagcttaacctatgtcagttgtattatagttcaaaatcgtctgccttgcttaggaaaaggcaggctgtgctttcagtgtcaggttgaaaaaatatataaataaaaaaagaaacgtgggaaaatagaccttcattaaaaamggcagaggaaggctccacaggaaagggagaactgtccagaaagaaggaaacctgtgaggtggaagaagtgctggaaaacgaacaggaagatgataaagaaaaatttttgcagcactttgtaactggagagcgaccccatggactgtagccgccaggctcctctgtccatgggattctccagacaagaatactggagtggattgcatgccctcctccagggaatcttcccaacccagggatcagtcctggg

SEQ ID NO: 620 - DNA, 501 bp, Bos sp.
ccagccagaagggttttcatcaagatttcaaagcatcataatatagaaaattatataatagaacagtgtgtgtgtgtgtgtgcgcgcgcgcatgcacgcatgcatgctgggagaggtagattgagatttgggacaagagtggcaagaaactttctcccatctcttaaaaaaaaaaaaaaaagcaaaaatcaagagaagatgaacttatttacctcctcttggaggagttcataagatcccctcagtgagartttcttctctctctcctttccatggcctcccctgactgtgtgtttgagtccaggacaatctgagatggtcattataggatgcagaggggatgctttgtttaggcgtggagatgccttgctgttgacctatgttcctgccctttcctctcatactgatgagtccagaatgtgcttctaggtctatttctttgaacgccctaatcctgaaaatctctcttataatgacgctttttggattttcaagcccaaa

SEQ ID NO: 621 - DNA, 501 bp, Bos sp.
caagaaagcaggaacaaccagatcaatgtcattggcttagagcctttcggttttatacaccagcaattccacactcagcaattccctttttaaaaatgcacacataagatacacacaaaaatgcgtggcacagaggggtttataacagcattgtctgtaagagtttaaaattgggaccaagctaagagtgcaatagtggttaccaggtgcccacttgctaccacgctccagagccttataaatgggtagamgtccaaacacagtgagaggtagaaggaaagctggctgcaaacgagagcggaatacatctcagcatctgtgcaccactcagctccccactgaggggccgtggagccgctccaacaaggatcacagcccaccaagaaaggcaccaaggtgatcaaccggtccatcctaaaggaaatccaccctgaatattcactggaaggactgatgctgaaactgaagctccaatattttggctatctgatgcaaagagct

SEQ ID NO: 622 - DNA, 501 bp, Bos sp.
ttaccttagtgattaggcatatgacattcatctgccactcactggtgatggtaatcttgatcactcggttaaggtgatgtcatttcttcacagtgtggttatgttttttcccccttgtgatttgtaaataatctttaagaccatataaatattctccttttcaccagagtttcctccatattaatttagcatcgcagatttttgttgagttcttttttttctatgtgttttcagcttcaagtactggtgtyttacacgtacccattaactaaacatgtgagcctgatttggtagtcatgagcagtggattttgtcagctgggttttactgaagtttttgtttgcttaggtcagcagtccctagcctttttggcaccagggaagatttttccatggattgggggtaggggggtggtttcaggataattcaagtgccttacatttattgtgcacttcatttctaatctaatgctgctgctgatctgacaggaggttctggctc

SEQ ID NO: 623 - DNA, 501 bp, Bos sp.
aagcatcttattcaaaatttaagcacagtggggtattattcagccatataaaggaatgaagtaccgatccctgctccaacatggatggacctcaaaaacatgatgctaaagggaaaggagccagacacaaaaggtcacagatactttgtgattccgcttttatgggatatccagaataggtaattcgtagagacagaaagtacagtagtggttgccaggggcctgaggaagcagcgactatttaatagatrtggggtttcatcttgagataatgaaatggttttgaaactgaaggtggtggttacatgagatcacgaatccactaaatgacacagaatagtatgctttaaagtggttagtttatgttatgtgaatttttaccttaatgaaaaaaacatattctcagatgctggagattaggatgtggaattcttcattcaggggtggccactgccaaccctgaacgaataatgaaaccagtccatcctaaaggaaatcagc

SEQ ID NO: 624 - DNA, 501 bp, Bos sp.
gacactcaggaggtcttacaatgagtaagatctgccactaatagaaccataactcatcattaacttaaacaattttgtacaaaatatttagttaaccaggacctctcatataattaaaattaatcctcaattaattaacattaatcccagtggagagcatacacacaccctctctctctccttccttagtttctttctctctctctctctttctctctgccgctagacattctgcaaaaatgcaaacaaaygcaaaccaggaagatagtctcaactggaccactctgatcttggactaacattcaccagaactgtgagaaaatgaatttctgttgtttgagcctcctggtcgatggtattcattgtggcagcctgagcaggctaagacaacctgcgagagtagacattcactggaagatggaagacactctgaatacagaaaccagagagacttaaaccaagaaattcactacatgagtgttagaaaaactgaaaagccag

SEQ ID NO: 625 - DNA, 501 bp, Bos sp.
aagaaaaataaattttttgagaaggtttgaaaatgaaggggaaaaaagatcaaaaagatctttggattatctgagatagtaaatgtttaggtccttggtctttaatggtgtctaaagacagcaccttcagtaacaaaataatccttggtcacaattatctgatatttatccagtgagtcaccccccgaacaggcaaaagcatttttggcagcacctattttaccttgaaattttctcttgcaaagtaaccstagcctgaccttggttagcttatcaaatgagctcatcctccgacctgaaggactgtggtctagcagaggagcggcgtggcaaccggccagcacagctccataaatcatctggagggcacccacctcagcagcattctcattctctattttcttttctttttcttggtcaggattagaaatatgggacaaaggcaggaggaaataatggaacacgggtgggccatggagtctgatcaatccatattggaaa

SEQ ID NO: 626 - DNA, 501 bp, Bos sp.
ggacagaggagcctggtggactgcagcccatggggttgcaaagagtcagacacaacttagtgactaaacagaaacaagtgtgggagaggagatggagggttatttgggggttgagttgatcgaacatagcttttagtgagactcagtttcctgttttgcactcatgatgaactgtggtgcctttactaaagcagggaatgcaggatgaagggtagcttggctgcataggaagtggagtgaaattaaggagyaaaggggatgagttctgtctttgacatcctggagctattcatgaatacctagatagaatttttcagtataggcattggatacaaaggactagaattcaggacagagaaaaaggtttgaacatcattggcatgtaggttgtaggtcaaagccatggaaatggataagatgactcctgaagatcagtgaaatgagaagaggagtatgaaaaggaaagaatggctggggtaaaaaaaaaaaaagagagagaga

SEQ ID NO: 627 - DNA, 501 bp, Bos sp.
ttcagtataggcattggatacaaaggactagaattcaggacagagaaaaaggtttgaacatcattggcatgtaggttgtaggtcaaagccatggaaatggataagatgactcctgaagatcagtgaaatgagaagaggagtatgaaaaggaaagaatggctggggtaaaaaaaaaaaaagagagagagagagagagataagcaaaaaaggtgtgtcttagaggcctaagggggaaagtgccaaaggagaaraatgttttagaaaggaaggattgttaacaatatcagaaggtccagagaaatccagtatgattaaattctgaaagggtttcactggatttgacaagtggaaggccttgttgctctgccagagtgctagaaaagtgaaactcaaatcctgctcagtgctgattggctgaatccaccgggcctgattggacctggccagtcagagggtaggtgtgcaaaggcaggtcacatttactgtcccttatttttctaa

SEQ ID NO: 628 - DNA, 501 bp, Bos sp.
agtcttctgaagtggcaggtgggttctttaccactagcgccacctgggtgagtaccaattaaatgtcaggcactgtactatataccacagatacattatctttatttctcacaagaggcctatagggaaaatagtcttctactagagctgcagaatcaggggtcagagatcataaaatgtgtccagggtcacacagctcatcctagcagtaaagtcagaattcaaacttatgctttttaagcctaatctcyccctatcttttcttcagagcccattaattcaaatgattcacttcaatgaaatatataccatgttgggccacgtgttcaggaccttcttgatacccttgacagatgcattaatatggcaattttcacagttttccagtagagtgaaaggacacttttgttcctaatttaagcaccgccatttctttttttaataacaaggagaacaagctgccagacctaacacgaacattcacaaaacaaaaaccaagag

SEQ ID NO: 629 - DNA, 501 bp, Bos sp.
caccagggaagtctaattctaagtgaaggtcaaatataatttgaacttttcattagggtttgccctgtctttgacattttcttttaaatgtgaagtggtcttaaaagatctgcaaagagtatctatccttcttataccctgtcatagtccccccagacatttgagttggcttacaaaccaaagaaatggagaaaaaggaaaataagagaggcgagcaagcaagaacagagtaggtgctttgaagaggatgmaaaagtctgtttttgctttactttgtttttctgatgagagaaaaagaagaaaaaccatttactcttctgcccagatcacatttaagttatgagtttgtggtggaggaggtgaaaataaaataaagaattcctgagtctccatcctgtgctctaaccgctagactgctgctccctgcttagttttcagaaatgtatttcatccatactaaacttgtttgatacgtaaaatgagtttaataaacttaaaagt

SEQ ID NO: 630 - DNA, 501 bp, Bos sp.
gggtgttttctctcacatgccctctgcttttttctgtgctcagggtcacatttttctgtctttttgggtttatttaaatagcccaaatatcacttcctcatagaaatattctctcaccagccttaccccattttgtcctcaattgacttagccgccttccttctctaactttataatatattgtgtatacttgcaggcagcaactgtgttttatttctatatccctggcttctagaagagtacttggtctrtagcagacactcagtaaattgctgtttatatgacaagacattttggcgtttattgttaacatcagttcagttcagtcgctcagtcatgtccaactctttgcgatcccatggactgtagcatgccaggcctccctgtctatcaccaactcccggagtttgctcaaactcatgtccattgagtcggtgataccaaccatctcatcctctgtcatccccttctcctcttaccttcaatctttcccagcgttag

SEQ ID NO: 631 - DNA, 501 bp, Bos sp.
tgctctccctccaccgagagctcattactgcagtcccttgttctgtgtctcctctgtaaggcctcgagatagggtaaagcccactttcctgagtttctgtatgggctctggaataaaatgatcagcattcaaattttggctctgccagttacttactgtgtgacctgagggacatctttgaaacctcctgagaataggatcaggataaactgtatataacaaaaatagcagggatttaaacaagatggctrttgttctctcacaaacaagcagctcacagaggtcatgatagcttgacctataccatgataggtatcaggggtcaggcttctccttgttcgatgtcctcagtaggtagctttcacctcatggtccaaattggctgccaggctctagtcatcaagtcaacactccatctggcataaaaagaggatgagaaatggatgcactttcttctcttgaacttgcccacagcacttctgcttatattctgtggccatg

SEQ ID NO: 632 - DNA, 501 bp, Bos sp.
gagaaagcacacagcatgttttgaggagccaagcgggaggctaagacagaggacagacagagagacagggtctggggcacatgcctctactagggaccttgagtggagtgctttggggctcccaggctaacgctggattggtcacttcaaatcgaaagaaccggttatggtaatccacactggggtcttacctaagtggagcctctgggaaggcactgggaagcaaagaaaactgttaatcacaagggctrttggtaagtcataccaggaattttgtgactctgcaggctgctatctagggcatgtgcttgtatgagggattagtgtcacttcagggtcactgtaggctgctcggccaaacaaaacggatgccaaggcagcaataccatgaagtaacttaggtaaactctcaacataagggaaatggggctgaaatatttgaaactctctctattatcttcatagtttttctgttaatctaaaactgttttaaaaattgtt

SEQ ID NO: 633 - DNA, 501 bp, Bos sp.
  polymorphism (251)..(251)
  misc_feature (479)..(501): Nucleotides uncertain from position 479 to 501
ttatggtaatccacactggggtcttacctaagtggagcctctgggaaggcactgggaagcaaagaaaactgttaatcacaagggctattggtaagtcataccaggaattttgtgactctgcaggctgctatctagggcatgtgcttgtatgagggattagtgtcacttcagggtcactgtaggctgctcggccaaacaaaacggatgccaaggcagcaataccatgaagtaacttaggtaaactctcaacrtaagggaaatggggctgaaatatttgaaactctctctattatcttcatagtttttctgttaatctaaaactgttttaaaaattgtttattttaaaaatatttataaagaagtaaataaaattggcattagcaaactgtaaatctttatcttagaaaaaaatatttggaatttagagttctttattagcattcaaatgtgggagaataataatgttttggaacaaaaannnnnnnnnnnnnnnnnnnnnnn

SEQ ID NO: 634 - DNA, 501 bp, Bos sp.
agaaaaaaagatttccgtatataaaaaactcctttaagctgccttctgtgacttcggtgcttttctcaatgcataaatcattatcgcctgactcagttttctaggtcatggaatcattaagctcagaatctgcctttcctagatgcaactaattcagtgctataatctttacttgtttgaattttacaatgtgtaactttgcacgtatttccaaagtatttttatgtgaattgatgattggagcttaacascttagtaggcaaaagtgaggaaggagcattgagtagagaaaggcttcagacctggatgatgatctgacactcatgaaagcaaagtggggaggaaacagacttggacaaggagagcctagcagagtttgcagatctagcgaggtctcagtcaacccagtgggaagctccagagcaaaactcgcctgatagaaaagttctgcactgagtagaagtaacgaggttcggtagccctgccgtgctcagtcactgt

SEQ ID NO: 635 - DNA, 501 bp, Bos sp.
ctgtcaagtggatgcaaagagtgaaaataaagacattcgcttgttccaattgccctctatggattacacaacttctacacttgatcttagccaaaaggctgagaagtgatgactacacagcttctaatgggctgtttctataacagattctgatgaatcatgaacaaaaacaccttcaaaagaacaaagagtcacaattttatagatcaaagaatatatttagggcttggtttttagggatattttccaamactgggtcacaatatgccccagcctgagagacatgaggtgacagagtccatgctttatcccaggtggatgagaaagaggggagttagaaaacttcctatgtcatttctgaagttatcctgggaaggcaggtgtaaaaagaaattgacatggcccaatttagattcacccagactggatgaagcagaaggagttccttttattagttattgttgcagaactcttaatcagcttaagattttgtggatcttt

SEQ ID NO: 636 - DNA, 501 bp, Bos sp.
cacagaaatctgcaaaaactatagctcagagttacttttaccccagagagtcagtttagcattgagcacgggttacaagtaatctccaagtatatgcagtggctcctactacttgccttcgcatctgcctctgagggtgacgtagcacccacaaccacaaggacccgggagaatcctgtggccactgccctgatgtcgcaatgatgatcccgggactgtggggtagtagctgtgtctgagttccctggagstattatggaaagaaaatgacaagctctctaaacattcagttaagtcccagtggaaaagccagagggattccatggagccctaaaataatcctttctttcgtgcagctataggtttttgaccttgctgaaaaccataccccaaattggttcttcccaggtggcacaagtgttagagaaccttcctgccaatgcaggagatataagaggctcatgtttgatccgtgggttgggaagatcccgtggaggaagg

SEQ ID NO: 637 - DNA, 501 bp, Bos sp.
tattagtctttgtgtgtgtggctgctataacaaattgcaacagacttgatagcttacaacaacagaaatgtattccctcgcagttctgggtgtcagaagtatgaaatccacagcaccgaacccacatgaaggtgccactggaagagcattctctccttgggtaatttgttttttgtctctttcatttcctggtggatccatcattccttgccctgtggctgcatctcttcaatttctgcttttatgatcaygtggccttttcctcttctgtgtgtcacatctctctgtttctcccttgtaaagacatttgtgatcatgtttagagtccacccaaataattcaggatactctatcaaagatatttagttaatcacatctgcaaatatgctttttccagttaaggtaacatttagaagttccaggaattagaacttgatgcctttgggacaattatttagcctactttaacatcagtacccacctgtaggggatacaactttt

SEQ ID NO: 638 - DNA, 501 bp, Bos sp.
aactatttaaatacacattatcccaaactaataaacatcaaatcctttgctttactcctcccctaaagcagagattcactctaggcagaataaggggaaatgaatttattagaaggatttcaaaaagctcatagaaccatggagaaagtccatggtttcataaacctggaaagtccaagtttcataaattagatggactagagcttgggcatagggtgagggctgcttttggatcacaagaatgttagggwtttcttccaagcagttgttccttgctgtgttctgcacaagattcagattttttggaaagtgaaaagtgaaagtattagttgcttcgtcctgtacaactctttgtgaccccaaggactgtatgcagttttcccaccaggctcctctgtctatggaattccccaggcaagaataatggagtgggtagctttgacccatctcagttcttaagattactcctcaaggcagggtgggacaccttcactgtcatgt

SEQ ID NO: 639 - DNA, 501 bp, Bos sp.
aaaaaaatcttcatttataagtgacagttttctcccctagttgtcaagaggcaagatttttttctcctccttattatcctgtggtccagatgcactagttatggttcatctcatttcataataacacatacatcacattggtgcaaataatcaagcaggcacctgtttcacaaagcctagccaacaacattcatttggcagcaaccaatagagggcaagtacagtctgatggggatggagagtgaaagctrttagaaatagaaaaagacagaggatttagacaggggagatttcagttaagccagtaatgtgacaatcaatgcaagcatctcctgggatcttttctttatctgccacctacctctctctgcaattatatgacaggccaacttgttagtcattctgcagtttgatacttcctagaatttgcaggctgatatgatcttttttcagatctacttccaagtgaccaatcactctttatcatcaaacattatttaa

SEQ ID NO: 640 - DNA, 501 bp, Bos sp.
gtcttctgtctggcccatttttacgttcttttcctgcagctctagttttgaatcttactgtgaggtcttggtgtggactcctttggttttaccttatgctcatcagcattttgaatctgagcctttacatggctttgccaaagtcaggaaaccgtcagccctttttcttggaacatttttttcagctccccttttctgtcccttgttctttgaacatattccatgaaaatcatggggaagaaagttgaagsaattaacctccgagaattctagatattagcaataaggaaggtgagaattctggagcctggggctttggggttctcccaaacgcactacacagccaaacgccatggactccatgtctgtgtgctttccctggtgaccctgggcactaccagtagttcccccaaagtggtgtgtcactcagttcaggccaaaataatgacaactgaatataagaagctatcctcagccctctccctctcacaccaaaacact

SEQ ID NO: 641 - DNA, 501 bp, Bos sp.
tgtctctgaatctttaataacaaacacactctcatagtaggtgtccaaaactatattattgattgttttatatgtgagttggagaaagatgcataaaaatgtctaagcatgctagaattctctttatttattttttggctgcaccactcagcttccaggatcttagatccctgaccaggggttgagcccaggccttcaccagtgaacgtggtgaaagcacagagtccttgggccaccagggaactatctasaattcttcatatagccatgatggagtaactggtattagacttaccctcttatcatgaagtactatgagtaagtgtgtcacttagtcatgtcttactctttgtgaccccgtggactgtagcccaccaggctcctttgtccagagaattctccaggcaagaatactggagtgggtagctattcccttctccagtggatcttcccaacccacggatcaaacccaggtctcccacattgcagatggattcttta

SEQ ID NO: 642 - DNA, 501 bp, Bos sp.
tgccctctctattgcatttttgattaggctgtaaatctttttaaaaccaataaaaatataatttcagaatgttttaaaagcaatctctcatgtcactgaattctcaagtgatttctgtttctgctttcttctacatataatgcaaagaggattctgatgaaaataatttaatagttaagtataatttttttttctaattacaaaaagtaatatatgatgacttaactgaatttagaccatgtataaaggtrtaagggcttcccagatggtgctagtggtaaagaatccatctgccaatgcagtacacatgtgttcaatccctgggtcaggaagatctcctggagtaggaaatgtcaacatgctccagcattcttgcctggaaaattccctggacaggggagcttggtgggcttaagtccatggggttacaaagagttggacacaactgagtgacttagcacacacacaaataaaggtataaagaaaaaagtatccagaatt

SEQ ID NO: 643 - DNA, 501 bp, Bos sp.
gtcctcaaaatgggagaaaatatttgcaaatgaagcacctgacaaagaattaatctccaaaatatacaaacagctcgtgaagctcaatatcaaaaaaaaaaaaaatccaatcaaaaactggacagaagacctaaatagacatttcttcaaagaagtcacacagatggccaacaaacacatgaaaaggtgctcaacatcactgattgttagagaaatgcaaatcaaaaccacagtgaagtatattaccttaygccagagtgaccatcatccaaaaatctacaaacagtaaatgctagagagggtgtggagaaaaggaaaccctcctactctgttggtgggaatgtaaactgatgcagccactgtggagaacagtatggaggttccttaaaaaaactgaaaacaaaattaccatttgcaggcttcccaggtggccctcatcgtaaagaacctgcctgccaaagcaggagataaaagagacccgggtttgattctgggtccggg

SEQ ID NO: 644 - DNA, 501 bp, Bos sp.
aggctgggacagtttctccatttacaccttttgccttcagaggcttctgggaaagcccatccctaattaaagattttaacaagcatattgccagctttctaacactgttattaaactgctctctttgttagaaaaggtgctgtttgtcggcagtttgtagatttagatatttagtatgtgtgtctgtagcctgcaaaatatttgtgtttttagaataattcaattagtatgttctgcatgtatgtacctgygtgcacaataaacatagcacacacaatataaaaattctgtataacaattcagactcacaaggacaaggaaccatggcttattttcatgaatacacagacttctctacagaacaaggtagaattggatattttaaggttggaactgttaaaacaatcaggttgagatcatgactctgataatttggggccaaggcgaaatatcttttacttgaaatatctgcatactaaggtgtattgaaaaagaatctga

SEQ ID NO: 645 - DNA, 501 bp, Bos sp.
gaagctgaaactccaatactttgaccacctgatgcaaagaactgactcactagaaaataccctgatgctgggaaagattgaacgtaggaggagaaggggatgacagaggatgagatggttggatggcatcaccgaatcaatggacatgagtttgagtaagctctggaagttggtgatggacagggaagcctggcatgctgcagtccatggggtctcaaagagtcagacacgactgagcaactgaactgaaytgagcatgaaaaaaacaaacctatcagtgatttctggaaaatgctggctgtaaaactcctcatagtttgcagaataaaggaacgtataaaggttcttagacattcctaggttaactgacagtaatcaattagacactacccagtggtgcagtcttttgtgattttaaggtcaattttcagttttttaagagataaaaagaaatattctttttatatatgaaaatccctttgttgaatttttaaactatat

SEQ ID NO: 646 - DNA, 501 bp, Bos sp.
ggttgcttccatgtcctggctgtttagaatagtgctgctgtgaacacagaggcgcatgtatcttttcaaattatagttttgtctggatatgtgcccaggagtggggttgctggatcatatggtaactctacttttaatctttttgtggaacttctatactattttccgtagcggctgcaccaatttacattcccaccaaccatgtaggaaggttccttttgctccacaccctctccagcatttattgttcrtggacttttcttcatgagatggaaagcttaactgccattttggaattttgggagtgccatgaagagggcagctgcattccctagaaatcccttcatagattttcctggaggtgtttgtgtgcttggcgacttccagctcagatgtggcttctccaggacactgagtgggacactcatgatttcagattcaaggtctgctctttgcaacttactcccagcattgccttgaggcgctcagccgtgccttgtc

SEQ ID NO: 647 - DNA, 501 bp, Bos sp.
cttacttactttctgccagctgcttgtgttaaatcagtgccttgaggcattatcttgttaaaatcgctgctactcccccagcaggtgggtgtctttgattgctgggtgggctgtgaggtcaccatgtccttcatggccatgcaggtgataaacattggcagagaggtcatgcccggtacacgtttaccatcagtgttctccaaaaacagaagtaattttccaccaaacatgcacctttgttttttagctcrttacagctggatgcatttaatgaaaaaaaaatcacataagataaaccagtaattgtagatttttataatagaagctgcagaccattcagatgctctaggtcatgtgactctgcctaatctgtggtttcccgcatccaccactcaccttgctgatgggaggcaaggaggcttcgcacaggcctcagcaggcaagtgacaaaactgcctagtaattcaactggtggcaggagcggcaggtttagaacggttc

SEQ ID NO: 648 - DNA, 407 bp, Bos sp.
aggaagcctgtagtttcctctatttacctacatttgtctattgcgtcttcttggaagggccaaacagtgctttgtgttaccagactatttcactttcaccgtgaaactcagttttctaaacacatctaacttgtctttctcttgtcaaacatggattcttgtctgtaagaatgaatgctctatacattctaggttcttatgttcataaaacacccatccaattttgtaacttttccagctttctggtacaygtgaacttctttgaaatttgctcattttatattggagttttttgcttgctttagtagagaaaagaacgtagcttgaattgcagtgagaaagataactctctcattggcagtgagtcagtttgttttctgtgatatttaaaggatgggaagaggcac

SEQ ID NO: 649 - DNA, 501 bp, Bos sp.
gggaagcctgataacttgctagttatcatgtattaatgcttaaggtccacaagctgattaacttactaggtaattgctgctggatccgtttaacattgtaaacctttgatttaacaaatcttatttttaactctttcctaccataaaagttggtgtcagtttttacaaactttttctcagtctcagaaagcgcatctccaagaggagagcttctcgaatgtttcctatcagggaaaatgtcctgaagcaawtgtgacttatccattcttagagtctttagaattctgaaagaggggaggagggatgcagcccctcaactacctgaaagctaacgtcagaggattctatttcagcagttaccgagcttcaattttacattgccttgtgcgactctgattcatatctgacttcatctcctctaacacataacaggagaacaaaaccacatacttttggctaaatgctttttgccagtacctggtacaatgccatgggaaggta

SEQ ID NO: 650 - DNA, 101 bp, Bos sp.; identical to SEQ ID NO: 196

SEQ ID NO: 651 - DNA, 501 bp, Bos sp.; identical to SEQ ID NO: 42

SEQ ID NO: 652 - DNA, 501 bp, Bos sp.
ttcttgcctggagaatcctatggacagaggaacctggcggttggacacaactaaagcgactgagtgcacacacaaaggattgttgtaagggctacagaagattacgcaaggaaagcaattagcacagcgcatgccatgttggcaaacagtaaatgttagcagttgttcttaatgctagatctgatcctatggacattggaaagctattgaaaattattgttacttgctgttgtcactgtagattaccgaamctctttctctttcgtctttaaatagtttgatgattaaacaaggaagtttttgtaaagtggttagaagagtgccagatacatagtgattgctatgtaagtgtttatcacataatttaatttaatctcctaagggatagaaagatggttttctcgttttatagatgaataagctaatttcagggaagttcggtttcttgcctaaggtagtatagctgatagaatggggaagccgtgtttcatttcatattca

SEQ ID NO: 653 - DNA, 501 bp, Bos sp.
acctcacatttggatgattgggaaccatgtatacacatttaaaaaaagctcctcctaactacagatttctcttttataaagaagatagacacttttatttgcaacctgaaacatacctggggtcgcacagagttggacacgactgaagcgacttagcagcagcagcagcatagttgaaggaaagaaaaatacatcagaacaagtacaaaatagtacattacaacaattacaaagcagtgtattaaccaaaragtgaattcttggaagttctgggttttaagtgaggcttggggaagatagctgctgtaaatcgacagggaggaagttaaggaaaagacttcctgtttgggtgatgcaaccaggaagtgcagggacgtgggggcctgcacttgccatgtgaaggttgataaatacacagaaggggttttgttgagaatcagagagatgaaactgatgaggtatagtgtaaaaggagaggaaagaacatgcggacacaggaaa

SEQ ID NO: 654 - DNA, 501 bp, Bos sp.
gatttatgtttcatgtatcctagcatttatttgtgcatagaaaaaatctcataaagttgtgaattaaaattttaaaacattttatgtgtattttaccacaatgtcaaaaactgaaaaaaatcaagtcaaaaatagaaaaagtaaaaacaactttatttctttatgattccctgggtcaacaataaagactaaactcagctagacagttcttccactggccttacgagggatcactcacatgactatagttstctggtgactcagtaaaggatgatctgggatgtcctcagtcacttgtctacaggctgatgctgcctgtcatctgagtcacctctcttgagtaggctggccacagatccttatcatggcaactgcattctaaatcccaatctgaaagcacttttaaaaatctctgcttgtttcacatttattgatgtcctcttggccaaagcaattctcatggtcaagttcaggatcaaagttggaggaaagggatccata

SEQ ID NO: 655 - DNA, 501 bp, Bos sp.
actatagcccaccaggcttctttgtccatgggtttcccaaggaaaaatactggagtgggttgatatttccttctccaggggatcttcccagcccgggtctgggaaaaccggctcctgcttggcaggcagattctcttatcactgagccacctgggaaggtcctctgtgtagagtacaactatttatcatagcatactaggctctgtactttctagatcctgtgtgtctccgtagctcatttttctgttcartcaattcagttactcactcagttccaactctgcggcctcatggactgcagcacaccaggtttccttgtccatcaccaactcccagaacttgctcaaactcgtcaatcgagttggtaatgccatccaaccatctcatcctctgtccccttctcctcctgccttcaatctttcctagcatcagggtcttttcaaatgactcaattcttcacatcaggtagtcgagtttcagcttcagctcagcccttccaat

SEQ ID NO: 656 - DNA, 501 bp, Bos sp.
tccaaagtggtagttccttgagatctagggtgccttttttcatttttgttgccagagcctagaacagtgcctgatagactggaggtccccaatatttatgaattgtattgaactgatggtatgcttattgattgtaattcaaaaggttaaacaaagcatgctgggattctaattgttggaaatatgaatatcttctgtcttcatctttctaataaaacatgctatatattggtttggctaatagcttacakaaaccatgaactaactctttggtcaacccaatacttagagggaatgagttctaagagttcatattaataatatttagagaataaagacttatcaagccttttctgcctgctagaacttttattctacctgaaacccacccagtgtaagctcagctcaagcaacattatatggagactggtatgaagaaggaagatttcttgagcaatagcttctatgcttagatcctagaggcacatactcctggtatat

SEQ ID NO: 657 - DNA, 501 bp, Bos sp.
ctaggggtcagctcgccatctgattcctctgtctcccacagtaacttacatatgcattcagtacatcttgactataagattaaggggcaataataggctcatgtggcattttattacttcaagtataaggccactgacaagaagaggagacagactggcacaaagccacagagagaacagaaggcaccctgtttctatgataagcatttgctatgtacaagcctgcctagagactgagtttattgcttatktgttgcttcattcatttgacaaatattactgagctctgtgtaaagttcagatgatggtgactaaaatcaagtgagatgcctgccctcaagaaacaggtctgggacttccctgatgatccagtggttaaaaatcttccttgcaatgcaaggggacatgggtttgagccctgatcagggaactaagatttcacatgcctcagagcaagtgggcccttatgctgtaactacagcgccctcacaccacaatgaa

SEQ ID NO: 658 - DNA, 501 bp, Bos sp.
taatttgcttggttggtgttatataccaagaagcaacatgccattttgcttataggtgcagaatagccatagtaacatgtcataaaagaatatggttgttgttacaggaaggtttgactgattttgctctcctttgcttgaataactaagatgagtacacctcttggtccatggtactctctttgacattctgcactttttttccctagtttgctgtcttggctgtttctggatctctctgtgtgtctgtktgctttactttgtatcactattctctcttttcttcatttttcttttatcttttcccactgatcttctccttaaaaatctctccctaaacaataaatgcacactttgggtttatggtgagtagactataaagcacatgttgataatttatcagttggacaaatggaacatatgttagttaaatttttagttaagggaaaatgttttctttttagatcattgtttagattattgtatctaatacagtaggtg

SEQ ID NO: 659 - DNA, 501 bp, Bos sp.
tagttattttttttattccacatataagtgatgctatacagtatttgtctttgtctaacttacttcactttagcgtaataccctccaagttcatccacaccgttgcaaatggcaaaatttcattcttctttatggctgagtagcattccattatgggcttccctggtagctcagctggtaaagaatccacctgcaatgcaggaggccctggatggattcctgggtcagaagatcccctggagaacatatargatacccactccagtatttttgggcttccctggtgcctcagatccacctgcagtgcaagagacctggattcaatccttggtttgggaagatccactgtaggagagcatggcaacccactccagtattcttttctggagaatcccatgtacagaggtgcctgacaggctacagtccatggggtcacaaagagtcagacacgactgagcagctaagcacagcacagcattccattgtatacataaaccatgt

SEQ ID NO: 660 - DNA, 501 bp, Bos sp.
cgcattgtggatgctctccaggaaacaggccacatgagctacccagagtttatcaagctagagtgatacacacaagactgtctccaggaagtctttgttgaccttgagtttgaggtttctccaagaccatttgccattagatttgggcttccatcctgtttacggtatgccttctttgagcccagtaacaaaagacaaaggcaacacgtatctatgaggcagggagctcaagtccatcagctaactgacargttcaattctttaatctctggagtggactggtgctgactagggacacaagagtacacgcgaggagagtgtagccgaggcactaaggcctgacttagcacagaaacaggcctgacaggaatggcagacttgtgttaatgagtagttaggcaccagcaggggcctgtagtcagctggtttgttcccgcacagccttgccagttgttaaaatactgtaatactgctgaattggttattaaatactttgaacaa

SEQ ID NO: 661 - DNA, 501 bp, Bos sp.
cacaaaggtgaagaatgaactttgacaaccaaataaataataactttgatcgaggaactcatttttttggtggataaattatagcaacaggctcatgtacacaaaaatcacttgtctcctgatacactccattaaatagaaatagctggcctgaataaagatggaatgtctactaaatgcccaattatgtctgtgtcattgaaaaagcaagagagttccagaaaaatatctacttctgctatattgactaygtcaaggactttgactgtgtggatcacagcaaactgtggaaaattcttaaacagatgggaatacctgagaaatcggtatggaggtcaagaagcaacagctagaactgacatgaaacaacagactggttccaaatcgggaaaggagtacatcaaggttgtatattgtcaccctgcttacttaacttatatgcagagtacatgctgagaaatgctgggctggatgaagcacaagctgaaatcaagatttccg

SEQ ID NO: 662 - DNA, 501 bp, Bos sp.
gatgggggctgtggcagctcaaggggtgacagctcagggcaggtcccgctggctgccctgggaggcctgggacacaggcaggtgtgggcttgggatttctcgtcatcgccccatatgcctcggtactgtttcaaaaccacgttcacacagcacaacacagctgcgcagcacagagctaggtctccctttctcacccgaggggccagcagggagccagggctggactctcctgggggctaagggtattctgragggagatatctatgattgaatacttagcagtgctcgcctcccaactgccttatgggacggtaccctgattattttcattttattatttttcacacaccacgtggaccccattcctgtccactgttgacacctttgcctcccttgaacttgtcctcggctctgttggtggtgtggggcacccgctcctgcagcagaccgacggagcgagggcttcatggaccagcacccatctggtctcctgtgcaagcc

SEQ ID NO: 663 - DNA, 501 bp, Bos sp.
ttgtggttcagtcgctaagttgtgtctgactatttgcgaccccgtggacagcaacatgctaggcttcgctgtccttcatcatctcctggagcttgttcaaactcatgtcaattttaaaactaccatatctaatatctgctataccaatatgagtcagtggtgccatatcaatatgtgtcagtgataccatccaaccatctccttctctgtcgtcccattctcctcctgccttaaatgtttcccagcatcaytgttttttctaatgagttggctcttcacatctggtggccaaagtattagagcttcagcatcagtccttccaatgaatattcaggattgatttcctttagcagtgactggtttgatctccttgcagttcaagggactctcaagagccttctccaacaccacagttaaaaggcattggttctttggcgctcagacttctttatggtccaactctcatatccatacatgactactggaaaaaccatagctttg

SEQ ID NO: 664 - DNA, 501 bp, Bos sp.; identical to SEQ ID NO: 137

SEQ ID NO: 665 - DNA, 501 bp, Bos sp.
agatattctagcttatatagatcttttttttttgtacttttattttttttatttatttttaattgaaggataattgctttacttatatatatcttgatccaagttttattttcatattaaatatagactgatagcaaactgacattgaagactacatgttagaactgacctgcttgtcttcaattttatttcctatcttttctctacataaatctttgtagagctgaaccactcattaaataaatccccayatttattttggcctgctagcaaaagtattattggatttccctaaacttctgtaactgcctcatcctctgataatttattaccacttactgtctgtagcaattgtataatccttacgtatatataatacttatgtataatgcttattgtacagtatctatattttatttatatactctatttcccagtagctatatcatcatcttgaagtcaaagagtatgtcatatgcttgatttttttctcaaaaccca

SEQ ID NO: 666 - DNA, 501 bp, Bos sp.
tctgcagctcctggattggtaggcagattctttactactgcaccccctaggaagcctcacatgtttctcaatttaaataaaaaattagaaatgattaagcttagtgaggaaatcatgccaggctgaaagctaggcctcttgaaccagttgtccaagttgtgaatacaaaggaaaagttcttataaggaaattaaaagtgctactccagtgaatacatgaatgataagaaagcaaaacagccttgttgctgmtatggagaaagttttagtgaatcaaaccatccacaacgtccccttaagcgaaagcctgatgcagagcacagccctaactcttcagctctatgaaggttgagagaggcacggaagctgcagaagaaaagtttgatgctagccgaggttggttcataaggtttaaaaaaagaagccatctctataacataaaagtgcaaggtgaagtagcaaggactgttctagggatcaacaacaagctagagcaagtcat

SEQ ID NO: 667 - DNA, 501 bp, Bos sp.
ttaacatcagtcttcaagttaaagggtccagagataatatatgaagctacagtgaagtcactcagtcatgtccgactcttcgagaccccgtggactgaagcctaccaggctcctccatccatgggattttccaggcaagagtactggagtgggttgccattgccttctccagatatgaaaatataaacaacaacaaaagcctagatggaaccagctgggaccaagatggcaaggaacttccacaaaccctyagtctcattgtatgttgatttgagtacattagcatattaaatatgacacacctaccagtggccatgataagccattaaggaccaaagaaggattgaaagagggtagcaccccaccccctcagaaaaaaccctgccccttcccggtagactaaggcagatacctcaccataattggcctcactcctctccctttgtctttactctttaaaattaaatccctcttgctgggtgggtgaggagttgatctgtg

SEQ ID NO: 668 - DNA, 501 bp, Bos sp.
atctttaactatctcttttgaaagtgtatatataccaaggactttcatcatttaaagataacacacagaaagtttaaaaatggcctgtggcttgaggttcacagctgggaagagacagaccctggaatcatctgcactgcttccagacaagtgtcccccatgccggctggaggaattcctctgaaatttgcctccaattttggctgtgcattggtttcatgcttattggctccttccccacctgcaagatrgagcttatttatcttgttgtatattgtctgctgggaaggccagagaaatacataccagccccttcaccttgccaactagtctgcacctctttcaggaagaacattttcctgtaaatgatgatccctcaagtgataactttagattttcttatagaaaaataatatcttgtgatcctttaataacagactttactcatatcaattcagcatttgatcaccgcattatttattcattaaatgagtcagttaa

SEQ ID NO: 669 - DNA, 501 bp, Bos sp.
tggccttggagagccatgaggcttaaatcaagtgaatgcaagggctgtggtgcagatctcaaagttcaaaaatccagaaatgttggggagggagggcccacaggaatcatctaataaaccttgcaccttcagaggaagggaccattggcagaaaaggggaggcagatatggagtgaataatgcccgagtcccaggctcctgcctcccacaccagcagcccctccttgctccatcctgctgtataaggaaargtaatctggaataagacacccatggactgtaatgaagagctcagggatggagtctctggaggcctgcctaggttaaagctaagtggccacctaataccctacagagtccaagccagacttcagaagaaagtaaacaggcctgggaaggcccaggtccctcttttctgtccagtgccccgacctggactcctctaactcactgccccgcgccccacacaaacagggaaggaacagagaggaaaacacatgg

SEQ ID NO: 670 - DNA, 501 bp, Bos sp.
atgaaattttgaatgaaagattcagaagtgttttctcccagccaagaatattttcaaatgttaaacataattttttaaatatatttttaaattataaaatactcctaattctctgtcttctctctttttcacatttggctctgctagggcagagcaacaggtgttgtcaagggaagaaagaaataaaaggtttacagattttcaagttttcttatgttagatcaaaagctggcaaacttctcctgtaaatrgccagagagtaaaaatttagactatgtggaacagttatacagtcttcatctcaactactcaactttgatattgaagcacaaaagaagccataaacctaggtaaacaaatgagtatagttgttgtcccatgaaactttagttatgggagctaaaatttgaatttcatataattttcatgtgttacaaaatactgtttaaaaaaaaaaacaacacttttttttccaacaattaaaaaatactaaaatcaatc

SEQ ID NO: 671 - DNA, 458 bp, Bos sp.
tccatgagtattagtttttttctcatttgaatttctattagaagtttgtttttaaacagagcatatcatttaaccttttttttttccctttttacccttcctgatcctgctgcttatttaaccttttttaatattcacatttattgctgtcctttatgataaataaaggtaagacccctttaggggattatcaagttgttgaggcctktatattctccttgaagtgttcctaactgccttgctttatatggttctttctcttccctgttgaggttttcatcattgcttttttctatcagcatccctgtctatggcactaattttccccttcattattgattaccttaaaacataagaaaccaaaattgtatgtaaatttataagaaatcagatttatagaaacatacttaaagagtaactgttctgaatgaggacatgaagatctctcctataaatca

SEQ ID NO: 672 - DNA, 501 bp, Bos sp.
tcctgactttgtctcattaatgcctggacacattttgtctgctgagtggaagaaccaatgctttttccaaatataaacagtgcatttgataggatacacagccaagaaccgtctgtcgaatgtttgcacatgactctcaggtgttctgtgggcaaagattagaaagaaaggttggctcatgctcctgactgggtcagccatccagaaatgaggcagagagtgtgtaaggcaagaggagggcttagattagraaaagtacaaacagaaaagtcaacttctggttgagttcctaaggccgagtagaattaaacaggtgaaaagcaacaaggggaattattcaagagaaagtacctcctgtactctacctatctctctggaaactttgatgctggctgcaaacctctcttgggataggcaagttgcctgcagattaaaccagttcatgaaccacatgcctatacctgcactcgaccctcaaggaaggtctctccctcccctttc

SEQ ID NO: 673 - DNA, 501 bp, Bos sp.
cctataaagagtgtaaattgtctgtcatttgagaaggaccattttaaggttttgaggagaaaagtaacaccaaaagttataattcagtaagatgaatttagtagaaaagtatgacattatatttaacaaaggggattagatataaagaatggccaattaaaaacctgttgaaattaactaagtataaagtttaaaaagtagaggggagggtcaagtagattctctggccttagaactgtgctttcctttcygttctttatctctttctctcctctcatctcatttgaaacctaaccagtgctttcaaagctcacgaatcaagttttctctttttgcatcctcattacttaatatttatttttcatttttggctcttgtcactcttgtgcatttcagttaatctttactacatacccaaatcttatcagctgctcaaaagcaggaattatttgttgcttttgattacataggaaatttgcatgggatcttttgcattgtaaa

SEQ ID NO: 674 - DNA, 501 bp, Bos sp.
ttaggaaagtgacaagatgattgataaatatgggataaaacctaagaaatgccagccagactttaggaagcacatgctgtggtctgctcagaagctggctgcttcactcctcaagaattgcctatactttctaaggttgtcttgataaacctatctacttctgggatgcggcattaaaaagatcacggttctcatacaactaagtcgtattttccaaacacctattagtaatgggttggtgttttggtctytaattcctttgtctaattcctctgtctttaattgaatgggcaaaggaactgttagatactgtccttctaatgtcctagttcaaggaccaaaaaaaagacgaagactggaacttgggtagtaaaataataactggagactgaggtatctggtatggcccaagcaaagactgcttctggacatttggtttcagcagtccacactgtgccatgtaacttggaaggttttttgtttgtttactttgttttgctc

SEQ ID NO: 675 - DNA, 501 bp, Bos sp.
tctccgcaatgagagaaagcctgtgagtagcaatgaagacccagtgcaaccaaacataaattaattttttttttcaaaaagcacatgatgcctttaataaaataaataggaacaactcaccattcatggagtgctgtcatggtgccaggcactattcatggaatatcttctctaacactgagtctgcaagaggtcaacacaaaagttttgtgataaatgctgactgtgtgatcacttgaatgatgaacacrtattttgtatcttgcccagagttttgccatgattttctaagtctctctccttattcagtccttaacgctggttcccactgctaagtcaggcctctcacacaaagcaatacatccttggtagcatgtgccatggaagaagcagcagggcgcacttagctgtctttgccttaagtggcttgaaatggcttcaaatggaatctcaatggagccagacattgcactctacccttacccactcctgggcactgga

SEQ ID NO: 676 - DNA, 501 bp, Bos sp.
gtctggagagcttttgaaatgaagaatgtctagcactttatccccttttctcccttgacctctaaaactcgtagtgataaggccaaggactctaattttaaatgctgtagttaatgctgatatccaaccacaatcaaaacacacttttcaatgtggtaagaggctcctatgtggaccctctacactatgcttgtctcatttaatcctcacaataagtcagtaaacattttcaacaaatagaataggaaacwgggcacagaagcgtgtttgttaagtacccctggtcacatatttagcatattttatgtttttaaaattttatttatgtgttttggccaccctgggtctttgatgctgcatgagggctctctctggttgctgcaagcaagggctgccctctagctgtggtgagcaggcttctcatcgcaggggctcctcttgttctggagcacaggcgctaggcacacaggcttcagtggttgtggtgccggggcttagttg

SEQ ID NO: 677 - DNA, 501 bp, Bos sp.
ccctagatgtggatgccatagtatgttagcttttctgttatttagagctgaaaattattctaatcaaggaaactgtcattcagaaaacttttagtgtaatatttatcaaaacataccaatatcccataagatatatcatagttcttatgacactctaaatgactctatcaatactgaattttttaaaactttcctatttgtatctaccataaagtcattatttttctttagcatatcttcttggtagacgwttggtttgttaaatacgaagagtttaacttgttaaatatgcattcattttattcatagcttttgtataatgacattagaggaaaacagaagaatagagaaatttgcaaggtaggaaatgccaaatgcttctaatatctggtatttgaaatattgaatcagacaagttaaagaattcaaaagggacaaaagaagttggacagctgcatgtaaatcgatgaagttagaacacaccctcacactatgcacaaa

SEQ ID NO: 678 - DNA, 501 bp, Bos sp.
ggaagtgaagcaaaatatgaaactagtttttctttcaaggtactttgaataagaggtctaagagtgggcaagaggtgtatgataaaggatttttttccccttttcccatagattatataagaatgaaaattattgaaaaatccaaacattttcactaccaaagtctcaagaataatagctataatacttttattttttgtagcttaggtataatagataaaaaggattgtggcaatctccaaatgtcactscccctctctatatctacattaaggtacctcatgttattcagttatccagtgattgtgtgctctagtggacactaaaatcctctttaaaaataatatcattcccttctcttgtgattgttacacacaaaacattaaaatttagtcatgagacattggcaaagtcttcttggtggtctgaggaattttatttactctttaaagggaccccaaaaaaaagatatatatttttttttactgaagtagtttgggt

SEQ ID NO: 679 - DNA, 501 bp, Bos sp.
ggggagtagcagcttttgggggccatgcaatatttgttttcctccctgtggggcagtgctgcctgtttaacttacatacgtgtctcaagagatttatccatgaatagtcacgcctcaagatggctgattgtgttcatctgtagtcatgctagtggctggtgatattcttaatttcttccacatcattcatccaaaacaagtgagtttgatttctgcccttaaatagttgccactttcatgtgggagagatkggataaaatggaagaatcagtcctttatgctttcccatgcctcacccacactttgcaaagttgaggtcttctgttcagggtatgaaaagatcctttggcccatacagttcagagatgagtggccctgtcatcatggcagctgtgtcatcagagcatctcctgtaactgacagcatgaggtggaactctgtgtctgggattgccctagagtcatccttgcccaacccttagtggttccaccaccaaagtct

SEQ ID NO: 680 - DNA, 501 bp, Bos sp.
atgtggctacatataaaaccagtaaaaagaaacagatcaacctaacttgaacaatattttttatttcaccagagatccaaaatgtgatttcagagtatcatcaatgcacaagttactagtgagatattttagatttttttcatccaagttttggaaatcttgtgcatattttatacatcttactagcacattccattcagaccatctcgtggctgctgtgttggacagcacagctctgagtcttttaaatkttgaccttctgactttttcttgtttgcaagtttcatttgttaccaactcaaggagacaaattttattttcttctcagagtagtgggtatgaatttcaagccatacatttgattatgagtgaaagattataattgttaattttccccaagttgacttaaatccaacactaaaagcccattatggggcttcccaggtggctcagtggtaaagaatccacctgccaatgaaggagatattaagaacatgagtt

SEQ ID NO: 681 - DNA, 501 bp, Bos sp.
tagtcagagaagaaggtcatgtgacaacaaagcagagagatattggaagatgctgccccgcaggctgtgaaggtagagaaaggggccaggagccaacagatgcaaggaacgcagctctagaaactgcaggaggcaaggaaggggattctcctctcaagcctctggagagagtgaagccctctcaatgcctttcagtccaatggcatgattttgaacttctgactcccggaacttttagacaataaattctkgttgctgtagaccaccaagtttgtggttatttgttgcagcaagaggaaattaattcaagcacccatcagtgtatctggtgaaatcaagctcagaaggagggactgggctcagagggaccagtggtgcagtcacggccacgagggatgctcaaagccacagaaatggatggagtggatgacagggaagaagggtgtgacacactgatgcccagagcagagctgaaccccagacagcaccatggggtgcagg

SEQ ID NO: 682 - DNA, 101 bp, Bos sp.
gctatttgtttctgctccagaagagagcagagttgggaaagaaaatgcatrtgagtcttgattaaccaagtgtttattacttgagaaacttgctgatcatt

SEQ ID NO: 683 - DNA, 101 bp, Bos sp.
aatatattttttggatttagtaggacaaaagttaactggttaaccttgaartgactgttgtacagtggttgtgcacatccttcaaaacacggtggaagagg

SEQ ID NO: 684 - DNA, 501 bp, Bos sp.
gtttaaaactcattgtatatttttaattgaaatttttatggatattgttgtagattctcatgcagttgtaagaaataattcagaaagagctagtatgcccttttcccagtttccctgaaaagtcgtggtcttgcgtaagtatagtagagcttcataaccagaatgtcaatattaatactgtcaaaatagagaccttttcatcaccacaaggaccattcctgtcacccttgtatagccacacaacacacttycttcattctaatctgttctctatttctctaattttgccatttcaaggaagctatataaatggaatcatacagtatgaaatcttttgcaactggaatttttcagagttctttacatatccttagacactagtaatttgtcaaatatgtagtttgcaacaatttcctcccagtctgaaacttgtctttttactgtcttcacataggctttaaaatagaagttttaaattttgataaggtctaattatcagtt

SEQ ID NO: 685 - DNA, 501 bp, Bos sp.
tacagtcatcagggtcctggacaaccctgaagcagaacatttaatgttcaaggtcagagttggtaatgtgtcaggcacatagtgcttaaaaacagttttggttggttgatttttcaagtttgacaccaaggctctacagggggcaaagccttccctgaacaaacgtgaggttactgtcagctttatctcacttagtgtgagtattcacagttcgctgcagaaattctagtgtgtttgattaaaaagtgccwcatgagatcctcctaaaatccaaaaaaaccccaaattccagaatacatctgtcccagaagtgtttttggtctttttaaaataaaaaaaaaacaaacatttgtctctaaagtctaggaacactgggagcagagaataaaatgtaattattcagtagcataataattattcaatctcaaactatcttttcttcaggaaattaagtacttaaggaaaatcccaagtcattactcacttggggtttcacttttg

SEQ ID NO: 686 - DNA, 501 bp, Bos sp.
tctcctataagaccaatttcccttctcccccatcagtctataaatatgctaaacagctttaaacaaacaaaccccaacacatagccaccatgtttctctccaccttgtactccatttctctattttccttttataacaagacgcctcagaagagtcatttaatattactttcttctttcctttaactcttgttataacttctatcaactccaattagacattcccacagctcctctgaaatcaatcctgtyaagtcactattgaatgtatggtcagtcctcattcaacagcttgctgcctgctctaccagtatttggtagagataacaactctaatcttgacttccctggtggctcagttttgcctctttctagttatatggacccggaaaaggaaacggcaccccactccagtactcttgcctggaaactcccatggacggaagaaccaggtaggctgcagtccatggggtcgctaagggtctttcacaactgagtgact

SEQ ID NO: 687 - DNA, 501 bp, Bos sp.
gtaccaaacaattcttactagactaagcatattgtctgtgaaaggttcttaaacgtgtcttataaaatcgctcaaagacaagggtgatttctgctgctgcccttcccacagtacagatagcctaacagaccctctatttggccttgctgacctactgaagagttcagttcagccctcttgttcctgccagtgatgcagagagcacaataaagtcctttcattatgaagtgaaagtcagagatacaggggcwgaaaaactactcatacagaattatttattgtctcaaatgtctcatggaagccagatcttagaatcttcagatttgatagatgtggaaatgactttgatatatgtggtggtacttaatggattagtgtttcactgggatgaagtgtgtaaattaacaaataaaaatgggttacatgaaacaggaaaagggaagattttctttttcatacttaactgatattccccaaggttcttttttccctccatgttcc

SEQ ID NO: 688 - DNA, 501 bp, Bos sp.
ctggtgtgctgtgattcatggggtcgcaaagagtcggacacgactgagcagctgaactgactgaactgaactgaagaagaggaagtgagaccagagttttctctttaacatgtgatgcatccgagagggaaactctgcaagactatgcacctgcaggtcggaaagagagctctcactcagagctggatctgccagtaccttgatcttggcttctcagcctccagactgagagaaataaatgtttatttttwaagcctcccagtctcaagatgttgttatagcagcccacaatgactaaaaagccagcccatccacgatctgaatattttttttctttcttttttcttttttaactttacaatattgtattggttttgccatatatcaacatgaatccgccataggtatacacgtgttccccatcctgaaccctcctccctcctccctccctgtaccatccctctgggtcgtcccagtgcaccagccccaagcatccagtat

SEQ ID NO: 689 - DNA, 501 bp, Bos sp.
gtggacagaggagctgttgggctacagtctatggggtcacaaagagtcagacacgacagagtgcacacacacacacacggttagatacccactttccctctgctcctataaaacaacaacaaaaaatttacaaaggccaaatgaataccatgattgaaataacttgttgcctggctttcgaaaactggggactccgtcaagattaaaactaagaatgattacctaagtcatgaaacacaatagtctaaaaycttggagacccagaaaaacatgttaggattcaattcacagtatgggaatgaaactcaagaagcccgctaatcctgtctggactctactccagaggcgttatctcattttaaagaccattcccctcaccgtcctcagcagaaggaatttcacagttccttacacagtagctgcacaattaacatttgtactaaacaacctgttattgacatgctagactgattctcatagtcaatctactttcttctgaga

SEQ ID NO: 690 - DNA, 501 bp, Bos sp.
agtggcacttccacctggcagtccaaccaccactaagacagcgggagcaaagatggaataccctgggtgatctcatgagtgtgtgctgattactcatgaggtgccatgtgctgtgctcagcgcttcatacagattttctcacttaatcttcacagtgcagttaaacatggcatttccttttacctgaaaccccattcaaatgatagcatccaaaatatgaaatatgtaaccaacatcattcattaactacrtagtacccatccccttgcccttcttcctggacgaattggaacaacaatttgttcagagcatcaacatgtcaaaccaatttcttagccttctttgcagcaaggagtaactataggaccatatgagccagtctgttttgggaagttcaggaaacaacacaatccttatcctttccttccttcctcctgacttaataatggatattatgttcagctgcactttttcattttttttaccatcagggaaaggcca

SEQ ID NO: 691 - DNA, 501 bp, Bos sp.
agcaggctctgttttgaggctctcagcacaaccggatctggcttctcaggtacagggaggaagagcacagtgtcagcaaagagtgttactgagatgatggaccctgagagccaggctggacataacggagagaacatggctgatgggctgagagacagaaggaaaaccccagaaaggcaggacttgtctcctttactgatacatccccagagtcagaagcatgcccagtacagagcaataaatagttacartaggtgcccagtaaaaactcactgcaagaatgaactgaagaaaacaagaggtcctaataatgttgataaatggctaactggaatagttgcaagaaataagtatgaaagacagaaggcttttgtcaaagtaggaaagaaaatatcttcattcttggcattttagtcattacaactttttgttgttgccctaaggcactaagttgtgtccgactctttgcaaccccacggactgcagcatgccaggcttccc

SEQ ID NO: 692 - DNA, 501 bp, Bos sp.
tttatttttctagatgaaaaaaatcaaggtccagagaagtcaaggtcaatcaaccacttagtgacagaactgagaataaaaaccaagaaaatctgactcataatttaggggttttcctagagtgactcagcacaattaaattcccttgctttcatcgcatccaaaataatgcactaccagcacctgcctagttgctgggctttcttgctggtttctaagcatggtggtatctagaataagctggcttcagraaggcaaaaaagatctaaataattgttttaaatagccagtttcctttcaacttctaactattctgttgcaactgttttccctttgagcaggtgttttgtggaggtctcctattcaagtataaactctgctgaattttgaaagcttatcagctgacagccccaggaggttatgactccatagatcatgtattctcagagaattattctgatttttttatctccttgttctgactcattatctaaaaaccta

SEQ ID NO: 693 - DNA, 501 bp, Bos sp.
caggcagtttctttaccatttgtgccaccttatacctcaacaaagctggtggaagtgataaccttgaaacatacttgaaaaagataacccatagaaaggggagaaatatttgctaacaatatatgcaataagagcttgcatctataatatggaaaaactcttacaactcaacagtcaaaagtcaatccaattaaaaagcaggccaaggattttaatagctactttccccaaaatggacaaaaagtacatgraaagatgctgaacatccttagccacagggaaactttacccttgccatcctcagtctctataaagccacagcacctcaaagcccaccaggcctgccatcggagaggctagagttgtgtccagttaaattacttactagctatgtggctcagcttcaacttctttgtctacaaagcaaataccttaaagattttgaagtcagataatccctgtcaaaagtctaggtaatacacaggctagcatctagcacag

SEQ ID NO: 694 - DNA, 501 bp, Bos sp.
ctcctcagacttccaacttttccgtttccctgacctaggatttctctcaggtataatattaccctatggacgtaggaacttttgggcaaagtaaggatatggctcaaagaaatctccacgttctcttttacgaatgtaagatgctgtttcttagaggtcctaaagatttatctggtccgtcccacacctttgattctaatagaggtccaagagtaaatgaataacccatcaattatttaccagagtaattmtgttctccagagatgcttcttttcccactcttctctcatgtatccaactgtgcaccacgcccctcctgaggaggcgtacttcaggttgtacaacttactgtgctctgtaaggcttggggttggatggggagcaatgagaagaaagaaaatctcaaacaagcctatttgtatttttaaataactacttagtaactctggagttggcagtttacatgaactgtctcatgtttttctcacaacagatagctat

SEQ ID NO: 695 - DNA, 501 bp, Bos sp.
tataaagatcacctggcagcagtgagcgagcagggaaggaggccagactggcaccagattagggagagaaggtaagaagagtcggggtcaggtaggggctgagggaatgaagtcaaggatgcagccctggtgggtcccactggactgggcgttgatgggatgtggaagtaaatgagggcattatccagggcccctcgtccagtcggggatgattcgatggcaggtgtttacattctctctgactcagaagmagaaatggagaagaaaataacttgtgttttagagtttaggtgcctgtgatacagctttgcagctcagcagagcctgggcctgcagtagcgacctggggacacaggccctctgaggcctggaccgtgggcaggacagggccacccaaggagggtgtttgggagaagaggccccagcagtcaggaacacagtgtgtgatgggacaggtcaagcaagaggagagcccaggaggcaggaaagacaccgagaggg

SEQ ID NO: 696 - DNA, 501 bp, Bos sp.
catcaccaatcctggcaccagcacataaagaaagcaacgccttctctctgttttcccaaatgtcaggctccagagtttcctgcctcatggtacccggccccccaccctacccctgctcaggggaggtattcatctcagctcagcgtcaggagacatggggcaggcgagggaagttgtcagtgattttccactagctgttcggcactgtgctggatatattaggcattgctagatatttcaggtgttatttygttattaggcagaaagcacacaaaaaaacggtaatgactcaggcctgccttgacctttcctgccttctgtgtggcagatttcagagactcaggccctagatttctcgctctctgagcctggctgctgggtgagacctggtccccacttcccctttcctggttggccctgcaggccagcacacagaccccgttttcaaagagtttcacagacagattgacaaaggaagtaacacaagtttcagaatctcac

SEQ ID NO: 697 - DNA, 501 bp, Bos sp.
gctgatctcgattccatttataggacagatttgcagaaaagtaggaaaatggttgacaccccatttcattctggtgacatattggagctgcttgctcataacagtgttgtaagtgtcctacaaacaaggcgatttgcactagcaaatgatatgaatgtcgtagcccttgtgcctgactacagtgggaattccgaggaactatcttgagaattcccaaagctattttaggctaataatagaaaacccacacyaagcacagtgttttagtttggacaaaggttattctaccttaagcagtggctgaaaggcagtgattgatgtttccccatcatgaagcacagcatgttagttccttacttcgtctcaaatttattgtcacgggaggacatttgtttgttacagtatgccaaaaagggaaaacaagttgttaaaggtcagatagttattaatgattttaactgaagaaaggatttaaaaatcaactccatggtatggactctt

SEQ ID NO: 698 - DNA, 501 bp, Bos sp.
gatttgcactagcaaatgatatgaatgtcgtagcccttgtgcctgactacagtgggaattccgaggaactatcttgagaattcccaaagctattttaggctaataatagaaaacccacaccaagcacagtgttttagtttggacaaaggttattctaccttaagcagtggctgaaaggcagtgattgatgtttccccatcatgaagcacagcatgttagttccttacttcgtctcaaatttattgtcacgrgaggacatttgtttgttacagtatgccaaaaagggaaaacaagttgttaaaggtcagatagttattaatgattttaactgaagaaaggatttaaaaatcaactccatggtatggactcttgaatgccttaccaatgatccattctaaaaaaaaatcttcatttataagtgacagttttctcccctagttgtcaagaggcaagatttttttctcctccttattatcctgtggtccagatgcactagttatg

SEQ ID NO: 699 - DNA, 501 bp, Bos sp.
ctggaaagtagatgcaagaagttggttgtacatatgagttcctgcatggaaatacattttaaatggaagatatatttctatgtaaatttttgaaataaaaataaaatactataattagctaaaggattttctgtggttacttccagaaggaaatttaaaacaagcaaaatgtatcttttcctctacctgcttaatgacccactgtcatttaccaaacgtcactaagtaatcttttggttttagaaggatcstcatttcctcagggatgtcttctgtcactcctcagttagctttccattcttactctgtaggtgagatctatgttcttacagtgcattgagttattttgccacagtgttcttactatcatacttactattataattaagttgttacttaattatttttcttacccacagtttacaaggcctgcgagagtggagctttaggatcttgtttacatcggtatgtgcagtgtttagaagaattatcagcatacaa

SEQ ID NO: 700 - DNA, 501 bp, Bos sp.
gatgtgctgccaaattcagaatttgggcattttgcaacggaaatacgctgtatgtgtactacacattgggggcaggaggagaaggggacgacagaggatgagatagctagatggcatcaccgactcgatggacatgagtttgagtaaactctgggagttggtgatgatagggaggcctggcgtgctgcgattcatggggtcgcaaagagtcggacacgactgagcgactgaactgaactgaatactacatrttaacataatcttgccagtggctttgagacaccatcttttaattaaatatgttaacatttctgcagcagtatatatgaatatttactttaggtgggataacgactacaaatagcttcaagttttgccaccagatcagtttggttcatgtcagattttgctgccaaactgagttatggaaaaaactgagttttcagagccttttggattttggacttgtggctacagggtggtggagccctgctgacaagc

SEQ ID NO: 701 - DNA, 501 bp, Bos sp.
tttcataccccacttttccataatgcctcctgggaagatgctacttgatgaaaaattaagttgaatcactttctttttacagagtacagagatgagagtgacaaacccactgtacatctctggcttgcataagttgctcttaaactgtcactttaattattcttgaactgcaagcttgcctccaggcaaatttcacagaggttttaaataatccattgtataaaatattatcatggacagtgggaaaataytgaaaataaaagacgaacacagagtttaaacaaatacatgaaacacgtttatttcaggacaggtaaacttttaaaaatagaccttaacatatttctgtgtagactaggtgcttgaaattttccggtaagtggttcttccagtgctttcctgattcttcgtcataggagggagggtgagtctatttcgctaaacactttgaagacactgtgagttataagtaattatcttagaacctgaaatactatataa

SEQ ID NO: 702 - DNA, 501 bp, Bos sp.
tagttcctctctccacgtcttttggttctgtgtttattccaaaccagatgaccagcttggtgagatcaccatatggttttttgtaaactttagtatctttgctttttacattgaaaactgagatctcagacttcatttgatttcccatacatccataagactcagtacctgcctcctttccccctagtccttcatcacatacatactgcttctggagactctcctagcctgacaactagaaagaaagaagyaatcacaaggtgtagagaattctacggccagctgtgacaaagaggcagtttgtatggtggttagaatatgggctctggagcgccaccgcttactagctaactgatcttgaacaaattaacctccctacatctgaatcttgtttgtaaaatgggactaacattaatcaacagtctgaggatcagtgagatatgtataaacttagtacttgcttcctgttatatagtaagctctctaatgaagagccaacat

SEQ ID NO: 703 - DNA, 501 bp, Bos sp.; identical to SEQ ID NO: 49

SEQ ID NO: 704 - DNA, 501 bp, Bos sp.
acctcaggaccagagtgaaaataaagacgtgacgacagaggaaagaggactcatttaaagagtgaggcacttattactggccctaaactttaaagacaaaacaaaacacccacaggagaggttatctaggggaacaggaaagacctttgacctaaaagatacaagtcttgcataattctttccctgtcatttaaaacgaaacttgctttactctgaactgaggggcattaacgagtcctttttcatcactkcgatctttatctttaaatgatcttaatttaagaaataattaaagaggacctccctggcggtccagtggtaaggaatccgcctgccaatgcaggctggatccctggtctgggaagatcccatgtgcggcagagcaactgagcccgtgggcaccgcaagtactgaggcccatgcccctcaaccagagggcagcccctgcttcctgcagctagagaacacctgagcagcagccaagacccggctcagccaaaa

SEQ ID NO: 705 - DNA, 501 bp, Bos sp.
aaactcccaatctattccccttcctacccttttcctccttagcaaccacaagtctgttctctatgtctgtgagtctgtttctgtttcttggatgagttaatttttgttgtattttagatcccacatataagtgatattgtatgatatttgtctttctctttctgacttacttcacttagaatgatcacctccaggttcatccatgttgctgcaaatagcattatttgcttcttttttatgaatgagtagtrttcccctggatatatgcaccacatcttctttatccattcatctgtcgctggacctttaggttgcttccatgtcctggctgtttagaatagtgctgctgtgaacacagaggcgcatgtatcttttcaaattatagttttgtctggatatgtgcccaggagtggggttgctggatcatatggtaactctacttttaatctttttgtggaacttctatactattttccgtagcggctgcaccaatttacattc

SEQ ID NO: 706 - DNA, 501 bp, Bos sp.
aatagcattatttgcttcttttttatgaatgagtagtgttcccctggatatatgcaccacatcttctttatccattcatctgtcgctggacctttaggttgcttccatgtcctggctgtttagaatagtgctgctgtgaacacagaggcgcatgtatcttttcaaattatagttttgtctggatatgtgcccaggagtggggttgctggatcatatggtaactctacttttaatctttttgtggaacttcyatactattttccgtagcggctgcaccaatttacattcccaccaaccatgtaggaaggttccttttgctccacaccctctccagcatttattgttcatggacttttcttcatgagatggaaagcttaactgccattttggaattttgggagtgccatgaagagggcagctgcattccctagaaatcccttcatagattttcctggaggtgtttgtgtgcttggcgacttccagctcagatgtggcttctcc

SEQ ID NO: 707 - DNA, 501 bp, Bos sp.
ccaaagagtagatcttattgggaattcttagaggaagtccactttcatttctctaagcatttgtatagttgaggggcctctgaagctgcatgttgtttttcaaaatacttctttattttgttagttagctaactgtggtctcactgttaaactactgtcagaggtagctaataaggacttgattttttttctttttaaagacagactagtggaagactaccataagctttgttatgctgtcttttgcaaamgataaacatttgctttccatcttgatgtcatctcttcaggttattatttggtcactaatttatctcaccattagcgaattacagtagattattgcttggatgtgataaaagcaccaaggagctgtggtcctgtggctatttcgggcaaagtcagaagcacactctttttttttttttattgtcctcccagggagcagaatttgaacttaatattccatgaaataagccattgtaatcacgttgggttaat

SEQ ID NO: 708 - DNA, 501 bp, Bos sp.
aattagtacagtccatttactagagttttatctttttttagtgagtgactttcaaatatgttaaaaacctttaaatgacaattcactaatcagagctccatagaaagccaacattccagacaaaaacctttccaaaataaatctccactttattaattaggtcattcaacttacactgtgcaagggattcaatggagtacacagaacatgcaggtctggataaagataataagttttcctgagaccctaaygagtttagcaaacttaacagaattaaagaagacagtaagggaagtgtaggtaactctatactttacacaatctttcatatagatagtataagtcatattatgggatatatacaggcctgaggtttgttgagtaatcaaaaaagttaaaataggaataatttgtgacttcccttatcatttgatctagagactaggctttttctttgtatataagcctgttaactggatctttttccacaagttaacctca

SEQ ID NO: 709 - DNA, 501 bp, Bos sp.
  misc_feature (483)..(501): Nucleotide uncertain from position 483 to 501
tataccactacagtaaccaccacatcctacaaaagattcctagcagtctcctgcctccactcttatccacattgctattcattttcacatcacaaataaacagatttgtgatgtgataagattaaggcaatcacagtatatatttccctatgtaaaatagcactcctacccctaataccctggaagtcctacacagtttgatctctgatgatctcttctactactctccctccacgtcagtgtatttcacycaacttgtcctttataaatctcagtgacaagacagtatggtactcgcacaaagacagaaatatagatcaatggaacaaaatagaaagcccagagataaatccacacacctatggacaccttatctttgacaaaggaggcaagaatatacaatggagaaaagacaatctctttaacaagtggtgctgggaaaacttgtcaaccacttgtaaaagaatgaaactagaacacttnnnnnnnnnnnnnnnnnnn

SEQ ID NO: 710 - DNA, 501 bp, Bos sp.; identical to SEQ ID NO: 161

SEQ ID NO: 711 - DNA, 501 bp, Bos sp.; identical to SEQ ID NO: 50

SEQ ID NO: 712 - DNA, 501 bp, Bos sp.
tacaaaaccaaagcaaagtctaaggtagagattatgagatcttaaaatagggcaatgtgtacagaatggtaaaatggaatatacacctactgcagaatgtgtgggagaaagaggtgacaacgatgaatgtttcttgtttggattgcctgataaatggtgaagatatgaaccaaatagacaatttattcagaaaataagaaaactgcagtttttcagtagatcatgatctttatgccttcaacaagtgtctraccaaatggtgatattgacatatactactatttctgtatatatggacaagctacaattcatggggatgctgatattgcaattgttagattaagtttaaattagtgatatacaatgccagaaatttaaatacaaaggggaggttcagttaatcaatcactccattgtttgttgtcatataacaagaacatctggatgattgaataagtttcactttttatatagattctttgccattcggtaactgccatg

SEQ ID NO: 713 - DNA, 501 bp, Bos sp.
  misc_feature (57)..(107): Nucleotides uncertain from position 57 to 107
  polymorphism (251)..(251): Nucleotides uncertain from position 57 to 107
taatttataagattgttgccttttgtattccatgatatataaccagcctctggccannnnnnnnnnnnnnnnnnnnnnnnnnnnnnnnnnnnnnnnnnnnnnnnnncagtctctgtcacaggcactcctttgctaatgtgattctaatcagttagacctatctcaacatatcttcataaatgatttaaattcatgctttcttttcatttatattattacatttgattgcaattctttaactaaagccagckatgattgttatacttcctccactgtgaaaaaagttgaggcttgacaatatgatggatattgtgaatgatgaaatttaactgagattttttcaaattccagcaatgagcagaactgagtatttggaggatgtatctatgaggactggaatgtgctaaagaactagaccacagaccacagaccactccagagacatgaaatagaaggcacagggcagacagtttctaggcagagagagtaataaatgctgca

SEQ ID NO: 714 - DNA, 501 bp, Bos sp.
taaatccttccccaagatgatggccatcacaaaagcatccgggctctgtgtgggtaacaagcagctgtatctcccagaatcctgttagattaatttcctttgggaaataatgtttgctgatcttgctgctgattccaacaccatgcagtagaaatctctaagtaccacagtctttgaatagatagataaggctcaagaaggtgactttgtatctgaaaaattttcaaccagaaaattgaaatatgggcttyattactatgggtgcttatttacagatctatttgcaatttaaaattaaatttaataacagctttcaaatatagggacaaatcatactttcctcatgaaattatttttattttttttataaacactgtgcatactcattaagtacaatttaggaagaaaaagtaagacaaaacaatttatctatacctctactattcgaactttgtattgtgtttgttttgttcttccatatgcctgtgtgcttagtagctg

SEQ ID NO: 715 - DNA, 501 bp, Bos sp.
gcatattagaacacttaacagtctttaactgacagttgagctataaacagttaggaacatatgaaggacccaagtacgaaagggttagtgatgttccaacgacatggagcccatagactggtgtccctggaccaattgcagaatcactgaacagaatcactaaaggctttttttaaaatcacagagccttgagtctcactccagtataattttttaagacttaacaacttttaacaacctctgcatgttayctttctgcatattaaagtttgagagaataaggcaagaattcttattcttaaagcaagatcaccttacttcagtgatcgctgaccaccagtatgtcagcaccacctaggaactgagatgcacagtactgggccccaccctaggtcttctgaattagaatttgggaaatgggcccaataatatgttttagcaagccttcctactacaggctattctcgaaccattatggagccatggcactgtcactctgca

SEQ ID NO: 716 - DNA, 501 bp, Bos sp.
ataatttccatgatatacagtcaagtaaaaaaagcaaaataaaagaaaccgtggggggggggcagaaaatatatatgtatctacctttttttatgtacagaaaaagaagtaatgaaacctaaaagggaaagggaaagagaggaaagatggaaaggatatgggttaaaggaatacttctcttgagtatatctttttgaacagttttacccattggaagcatgataatgttgtatgtgttcaaaaaataaaaytaagcagctgagggtagagggaataaaactaaagacaaatagaaataaataaaccccactgtatttcaaatgagtgacataacccccctgaagatggtgagggggagaactgatccaagtaactctgaatgcagcagtttgattatgcacctttaggctaaagacaaaacaactgcaaaccaaccctgaattgtttctagtaagtttgtttttcacagtggttgagcctgaaaatccaaaactattgtag

SEQ ID NO: 717 - DNA, 501 bp, Bos sp.
agatcttcccaacctaggaattgaactggggtctcccgcattgtaggaagatgctttcccatctgagccaccagggaagtctaattctaagtgaaggtcaaatataatttgaacttttcattagggtttgccctgtctttgacattttcttttaaatgtgaagtggtcttaaaagatctgcaaagagtatctatccttcttataccctgtcatagtccccccagacatttgagttggcttacaaaccaaasaaatggagaaaaaggaaaataagagaggcgagcaagcaagaacagagtaggtgctttgaagaggatgaaaaagtctgtttttgctttactttgtttttctgatgagagaaaaagaagaaaaaccatttactcttctgcccagatcacatttaagttatgagtttgtggtggaggaggtgaaaataaaataaagaattcctgagtctccatcctgtgctctaaccgctagactgctgctccctgcttagtt

SEQ ID NO: 718 - DNA, 501 bp, Bos sp.
aaaattatttaaatattcattaaatcaacaaatcttgatgaggaccattgatataagttattcattctacagcatagagatgtattattgtgtttcagaatatcgtggtttaatgataaagtcatacatgtaattaattacattgcaatgggatatgtgtggcaaaagacctgatggtttactttcagacttcagtgaagcatagtgtggatttaggggggaacaggaatgttaggatttcacaaagaacrtgaagtccagacagacaaaagatggcgtgggaatgatgataagtcacctcagaataggaaagaggttatgcagggagctgccatgaagtatattggaattttgggaagtccagagagaaggcatggttttgacacaggctgtatggtagggaatggttgtaaataaatctagaaccaggtgaaagcagatcctcagtccagttcagttcagtcgctcagtcgtgtccgactctttacgaccccatgaccc

SEQ ID NO: 719 - DNA, 501 bp, Bos sp.
attccacattagatttctcaaattactgagcttttcatgtaatctcttatcacaaaaaagttacttactattgttgcatttataatatgtgtttaattgagtggggatacagaatagcttctccaggtttaagattgccaactctgcagaactagtatcctgggcacctgttattaagatgacatttaggagattaagttttttttattaattaggtttttattaaatctatccatttgagtctctacccyttcaccaattaataagtaatctggagaatccctttcagaaggtaaataaaaacaggaataatcaagagtctgcagtatctccacacttaggtttcaatgaaaatctaaaaggagttgaatttacatttgaaatagacatattttagggtctcctcctaagagtaaatgtcataagcaattatgatactgtagttatagaacctttgagagttttaatgattactgtgaatggtgaaaagagttttgtaac

SEQ ID NO: 720 - DNA, 501 bp, Bos sp.
gtctgggagacccttggaggaggaaatggcaccccactccagaattcttgccagaagaatcccatagacagagaagcctgaaggagcctggcaggttacagcccatggggtctgaaagagtcagacatgactgagcgtccaaacacttgaattaaagagctgatgatcaaagagtttgagtaacgtgctcaggttcctttagcagatctaggattcacatttatttgtatctgactttacgtttttaatgytcttaccactgtatctcaccacccttgattttaacatcagtgactaccaagtcacccaaatcactttctgactttcctccaaactacataaagactgtgtgttttatctgaatttgctaatcttatacagaaaatatgtttgctccatctatctttccatccttctgaaggcaatgtttctacttctcaacttggatagtgttcctagtctatattcccactaaccaacagctttgttatggcacattca

SEQ ID NO: 721 - DNA, 501 bp, Bos sp.
cactgtgggctgtaggtgaggtgagactgtttagcaccttgaagcccaggtcctgggcactgagtcatgctatagagctcttctaatcctttagcactctccccagccctcccttttcatctcatggcactcagcaaaagcataaaagccatcaggactgaatctattccctaagcctgcttataaacctctcagagaaggtgttttcagtggcatttcagtggccttcaaaggagtccatataatgagargtacaggtaatagatggatgtctaatctacagagcgttctaaaaccatactacaactccatgtaccagcagttctcaatagtgtcagtaattaaatactcaaagaaaaaactgttctccaaggactaatttgtggccccctctgtggacccagagtcctcctccctgctattctcccttccactttcgcagattctttctctatattttatcttccctctttcctgtccttttaaaccctgcatcttcag

SEQ ID NO: 722 - DNA, 501 bp, Bos sp.
aaatgtcaatttcttctggcctgaaacctttttgtagagaaatcagttgataggcttaagtgggttccctttgtaactctgtttttacttttgctgcctagaaacatttctctaactttgctattttaattataatatttcttattgtgggtttgtttgggttcatcttttttggaggggagcttctgtgcttcctttacctggatatctgtttccttagatttgggagattttcagccataatttcttcygttgttttcagtccccttttctcttctgagatcctgttatgcatagattggcacactttatattgtcccatgctgctgctactgctaagtcacttcagtcgtgtccgactctgtgcgaccccatagacggcagcccaccaggctctcccgtccctgggattctccaggcaagaatactggagtgggttgccatttccttctccagtgcatgaaagtgaaaattgaaagtgaagtcgctcagtcatgtccg

SEQ ID NO: 723 - DNA, 501 bp, Bos sp.
attataaatttataaaaacatcttgtttctctggtccccaaattgtattctgaagcaggaagtacagacttcttgttaataattcccaatcttgtccaaattaatgcacgttaaaataaatcataaagttgagttagagatctcattaattgaagccccagcacatattttagagaatcttaattattgggctaattactcaaactccactttttacttttttgcagaaaaacagttctagattagaattygcttctttgaggtagtagtgtagagatgtgtgcttcttccagaactctgggtgaagaatgcatttttagttatcatcgggaatatattaaggacttaaagtactgggcttggtgaaatatgggaaaatgtttattgcacctgattttgcaatgagaaaagacttgtagtaacaggaaataagcaatgacaatatataggtgattaaaatgccttaattaggatgttttgtttgcatttttatggaaataa

SEQ ID NO: 724 - DNA, 501 bp, Bos sp.
tgtttttaaaatataaaatgcagaacgacttaaaaaagaataataatcatctagttctaccaaatttttccattgtcaataaaaatgtatttgtttccagtttgggtttttctgtctgttgttttaggaaaaattatcctttgtagaaatgatgcatgctttattataaagagtaatgtctatgaaagtaaaatacatttttttacattaaacaacttgaaaagtacaaagatatgttttaaaatgtcccyagtccatatccagaggtgatcattgttaacattgagtgtatataatttcatgtattttgccatacatgaatatagttagaagggaaactagctagagagatgaatatgaagaaatgtgttttattaaaatggaattacagatgctagttttttatttttaaataattaaatttacttgaatgttgtggggaaaaaacctgtcctaaagacactgttgaacttcaaatgaatgtttactcttcacaagaga

SEQ ID NO: 725 - DNA, 501 bp, Bos sp.
aaatgaatagacatgcaccataggattctagaccctgtagaatcccagggcctgtacagactgaagcctagcagtctcttgtgcagacactgccagcagaatatttgaagttgatgcagcttagggaagaggctgatcttcacagaaaagctagaatttctaaaaaaaaaaaaaagtaaagctattttacccctaatcatagacaagcattaaagatcttaaaacatgactgtgatcaggcaatttttttyctggcatacttttaagtgaatactagtgtctgcacaatttagaatgaagacctgatgttctaatacatcccatatagtctcattttgaaagccatcagctatgtgatcttcctgagtctcagcctgcccccttctttggtacagctaaaatgaatggaaaagcacagaaatcatttagaattgatgtgaaatgtatctttttctagctgtcctaagacatggctgagactggccatcacacatccaactt

SEQ ID NO: 726 - DNA, 501 bp, Bos sp.
ctactcccccagcaggtgggtgtctttgattgctgggtgggctgtgaggtcaccatgtccttcatggccatgcaggtgataaacattggcagagaggtcatgcccggtacacgtttaccatcagtgttctccaaaaacagaagtaattttccaccaaacatgcacctttgttttttagctcgttacagctggatgcatttaatgaaaaaaaaatcacataagataaaccagtaattgtagatttttataayagaagctgcagaccattcagatgctctaggtcatgtgactctgcctaatctgtggtttcccgcatccaccactcaccttgctgatgggaggcaaggaggcttcgcacaggcctcagcaggcaagtgacaaaactgcctagtaattcaactggtggcaggagcggcaggtttagaacggttccctttatgacttgcgagaaggacttagctactcctggttgcttcatccaagcatcttcctcaccaagtg

SEQ ID NO: 727 - DNA, 501 bp, Bos sp.
tttgccttcccgacaaatacaacttacttctaagctgccaggacctcaaaagcaggataatcaaccatccctgctgtttgctttcagaagctccgttttgaagtcaaggcataaacagacactagggaggtagcctgggttttacatttatgatgaaaagttcaaagaggcagctttctcccatttaccttaatgtctattcacattcaggctgtattttcagtgaatatatctatagggatgggaactaygaataaatacaaccagcttgagatccttattctactaagttgatgtcagaatggcattttgagccctatttcatttatttattaggagccctgctccctaagacaaatctcacagacgtgcatctagactagagggtgtgaccccaacatccccagcaggctctcctggtacctgggctgccctgctggtaccctgtgtgcccgtcaccccttgcctgtggtcggcagccccgggcaggcatgaggcccg

SEQ ID NO: 728 - DNA, 501 bp, Bos sp.
ctgtccttccatacaattaacagctctgtgcaagggtagtgagctaactatctgggtgccccttggcattgacagatttaaaggaatacttttttttcctttattctaaaatcttctgtgatcaaagaagactcaagggtgtcaagaagaaaaacaagctaacacaatttgtaatgaattatgaaaaatctttccctgtagccatgggtaactggataagaaaacactaaacaagtccccttggggatatkacatgatggtattcaattttatatcctgcctcctgcattggggatttttgtaagctacagacagactctgagagacagacttatataaatagagcattgctcagtgatgaggttacccttggctataaagcaaaatgacttctaaacagatcatgacaaagaaaaagaaagaggagatggagggggagagaggggaaagtaaggagagaaaaagagagagggagggaagaaagaagaaggaaggaagaga

SEQ ID NO: 729 - DNA, 501 bp, Bos sp.
cttcttgtacaggactctgtcgtccattgtgctcatcccagaacaagatggcattctatccaatccctggcttctgtttctaacattgcatgacagttcttggctatcaggcttgttacaggaccaaagtcaagtcagccagcaatgcccttaccaaatatgaaacatattgatcacataggtttatgaacaaaatttactatagaccaacaaggggggatgataacaagcataacattccaagtttacargtgtttctatccttcacttttgtatatcagaaagtaaaatacagtgctcactctctctctctccatctctgtcttttcagagtgattcaacaataaacctctaaaattccagtagctaaaatgtcattattatcactactggaattaagagttctatcaaatcttaaaacttggaaacatctgaatcatttctgttcttttccattctattaacaaaattgcatactggtgattagtgataattattttg

SEQ ID NO: 730 - DNA, 101 bp, Bos sp.
ccctcatccatcctttgcagaagatggaaaaaaaaaatcatagcactcttrgcagtaaaattttcacgcatgttaacttttattctgttgatgtttacaat

SEQ ID NO: 731 - DNA, 501 bp, Bos sp.
ttgtagattctcatgcagttgtaagaaataattcagaaagagctagtatgcccttttcccagtttccctgaaaagtcgtggtcttgcgtaagtatagtagagcttcataaccagaatgtcaatattaatactgtcaaaatagagaccttttcatcaccacaaggaccattcctgtcacccttgtatagccacacaacacactttcttcattctaatctgttctctatttctctaattttgccatttcaagraagctatataaatggaatcatacagtatgaaatcttttgcaactggaatttttcagagttctttacatatccttagacactagtaatttgtcaaatatgtagtttgcaacaatttcctcccagtctgaaacttgtctttttactgtcttcacataggctttaaaatagaagttttaaattttgataaggtctaattatcagtttttctttttatagatcatgttttcttgtgtcaaatctaagaactcta

SEQ ID NO: 732 - DNA, 501 bp, Bos sp.
caggacaataacgtaaaaagtcagggaccgtgatttcgatgacagtgcacggtgatcagtgtcgctgttggtggcgatgggaggatcgtctccagacagcaggggattcaaggaaacaaacgaaggctgataccagagtcccacacctgctctctgggtgcagtcgtgtgggctctaaagccacttggctctctggcagtcacttgttcagaactcatgtattgattataggtgaactcattgattgagamtaaatctctggtatgaaaagatttgttaaaaattaaatagcttttcattttctaacggtcatcaagagccttggaaagctgaagatcttgtttaagagctattaatagtaacttgaagtcattgcatcagagtccttttcttaggtttaaaaatgatgttgttactgaataagaatgtactcttgtttggcggagatgcatgcagaagtgttaggcgtgaagtgtcatggtgtctacagtctacttttca

SEQ ID NO: 733 - DNA, 501 bp, Bos sp.
catcagcttgactgactggtacaacctgtagagagagagggacagcacatgaaatttgatgtggctccagggcagggccatgcaggatttgctcactgcttggaagctgggattgttaagttatatcactacctaacttccactgactcagcctgacgtcattagagccacttgggaagtttattaaaagtgcacattcttggagattctcatttaataggcttgtagctcaggaatctgtgccttctttytccttctgtttgttttttttttaaaggtatatctgcatagagtaaagttcacagtacaaagattatattccctcccacctttgatttccagtctccagtgcctccttccacaagcaactcctctaacttttcttgaaggccctccagaaatactgtagacacaaatttgtacagactgtaggtacacatccagaagcaccctttacgtaccactgatttttgttcattaaatatttcttagatattgttc

SEQ ID NO: 734 - DNA, 501 bp, Bos sp.
tttagctgattttttttttgggagactgaaatagcattactctcctaaggcctgcatgaaatgactccttcagttaagttctcgtttggcatttgggcattccaagtcagctgagaaaaggctattatgccccatgaaaagcctgcacttgatcagtgagtcacaaagatgtgaaataacataactgaatgaaaaatacagtaatgtaggtttgagggagtattattgttgccaataatatttttgaatayacggaagttgctttttgatgagtttcactgttttatctgttagagatgactcctcacacatgtattaccgtgcaggtttttggaaaccttttagcttgtacaacttgagctatttttcttgaattcattttccaactcccggacatccatattttatacctatttccttttgactaagcatgtcataggaagttaccctaatctactgcctgtcagggatactgaattgcattgctttataactttgact

SEQ ID NO: 735 - DNA, 501 bp, Bos sp.
tgagagctgaaggtccaaaccagagaggcagaggcattgtcaaatccaagggtggggggccctccctagcagtccagtggttgggacttcaccttcctatggagggggtgccggtttgatccctggtcagggagctaagaccccacgtccctcgtggccaaaaaatcaaaacataaaacggaagcaatattgtaacagattcaataaagactttaaaaatggtccacattaaaaaaaaaaaaaaaagtccwagcatagggtaggaagtgaagagatcaaggacttttaagagcatgagacaaagccaagccaggaattgagatgatccagaagaaaaaccgctgagttgaccgtgtggaccgcgagagggtgggacaagaataggcaggcagacagccctgaccagccatcactagtcaccccttcacttgatgagacttgtgaaggcacacggtccaacagacaatggaggatgttggctgggtgccaaactctgtgcct

SEQ ID NO: 736 - DNA, 501 bp, Bos sp.
aaaccactaattacaattaacatttgaaacaagggaagagtttaaggaaatattaaaagcatatcaagttctataaatatttcaatagaaagaaagatatagatatcacatgagtattacaaagtactttagagagagattcatttataataaatgcatgaatggggttgtggctgttctaacaaaatatcaactctattaaattcaatttaacatgagaaattagggctgctatttattcctacttcttyatccttgaaattctatattgtgcataacaagaaagtttcacagttctaaatactgtatttgtacaaagataaagagtgtctaaatgccagaagaaatgtgcactatgttggtgaaaatattattacgtagattttaatcctcaaaattttaagcacataggagcattcactgtggaaagcagaataattatagaaatagagcagattaagataataaagaaaaatcttttcctaggtctgacttgtattt

SEQ ID NO: 737 - DNA, 501 bp, Bos sp.
ttgggggctccccaggtggctcagtggtaaagaatctgcctgccaataccagaccagcaagttcaacccttggatcagccttgggttgggaagatcccttggagaaggaaatggcaacccactccagtattcttgcctgggaaatcccatggacagaggaacctgacaggctatagtccatgggctcgtaaaagagtcagacatgacgtagcgactaaacaacaacaaaagacaccttagaatggaatgayttacacatgttttcaacttcaataaatactgtcaaacagttttccaatgtggttctaccaatttatattcctacgagggatataggagagtatccttacttacatttgatgggctctgtatttttcattcagttttttagttgatgtgtagagcagtgtttttgcatttacttgccacactccttgggcaacacactcttctgtacctgagttttcttgtctgtaaaatggggagaaagagagcacatta

SEQ ID NO: 738 - DNA, 501 bp, Bos sp.
tcttcagtttacagtgttctcaaactggagacagtgaactcaaagggaagtattggatgtattttatctttataccctccatagccccaggagtgtcatacacttactggaagattacaaaatagttatcaaactaatgttgagcgctccagatgcttgcatataaaaggataataaaaataataatttgcatggatatagtagttactacttttcagagtgctttccatcagtgatctcagtgataattmagaactatttttttggaaggaagcatgcagaatgttgcattagtaagtttaattatttcttaagcttgctccacattacagtggtacacaaatgatttaagtagaccctaatatttgtgttagggaaggacccaggttttatggggcctggggcttgtagaattttggagaatttcattaagagcaacgatacaaaatgatgggtagaaagctaagtacaacagtgagtatttatttaaaaaaataaatt

SEQ ID NO: 739 - DNA, 501 bp, Bos sp.
ggatatgaatcttatgttttctttctgtacatttacatagactccaccaaaaagtctcaaccaagaaggctccttctagctcccaaagatacatatacgcagtctgcttctagaatgaagggaattgaactaagatacaggaatgtatatagcttttgagaaaatccctttactatagcataaccatggtcttgcacacctaaagtaaggatgtatcaacaaaacatatttttagcataaatgtcagagayagaaaatgtgttgtggttgagacacaggaaatggagttaaacagggggtgggtttcaatgactcttgtccgtggagttaacttgtgcggtactgtagtgtcttactcccttgtaaaataaggacaatgtgtgtgtacctaagtgtcataaggatgaacagagacattatcctgcctttccatgaagcattttttcccctcctcagtttggagagttggactgatcgtacctacttattttatagcacatg

SEQ ID NO: 740 - DNA, 501 bp, Bos sp.
aaccgggcacacagagctctgcccagttacatgtgtgctagagcaatgggatcagatctagacctgggcaccctgggagaatttccctctcacccatgtttctgagtgcttaagaagccctgcattcaaagtcaatccacaggactattgcctataaactatggttaaaatatctgtcatcatatttaacaaagtaaccatatgcaaatgctagaaagttcaagagtctaaggaaagaatggaacaagtgsaaattgctttctaaccaattatcatagaaaattggtatctatgataatgaacagatatacagtggcctacaacaggagttttctttgtttgaatctttctttaaatggagtattgaattgccttatatagtagtcagagttttcttttaggatttttaaagttaaggtattgcatacaggagaatcttaaattgaataatcttaaattgttcttgtaatcctttctgttacatcaagcagagattataag

SEQ ID NO: 741 - DNA, 501 bp, Bos sp.
gtccttttttatttgtcaagaaaaaatttaaataatgcatatgtaaaggaaacttagatgtatattactatgtaaaagaagcatctttaagagtctctctctatttgaatacaattatctttggaggcaacaggtattaaactttaaattattctttggaacagagtttaaaatacagattaagaacttgggcattggaatctagcaggctaggggtgagcactggtcctggaacctaccagctatatgascttcagtatactatttaatatcttcaggtgtcagttgctatcactaaaaaatggggatcataataatgtaatttaactcagttattttgtgagggttaaatgaggtgatgcgcataaactccttaggaaacactccgggtcacatagcatgcatttttgattcctgtatctaagaaccttgtaataatgtcttttaaacatacattccagtgttcttgcctggagaatcccagggacaggggagcctggt

SEQ ID NO: 742 - DNA, 501 bp, Bos sp.
gtaaaaaaaaaaaaaaggaaatattttaaattagtgctgtttaactcagtaagttctaaattgataaattatgaaatcatttttaaagttttttaaaatgttcattactttaaaatatgtaatacatctcatgtatccagaatttggatgaaaatattttgtatattttccttgtaatattttaaaataaaaacaaaaatgttacagaactagttaaagcacttgccttatctcactctattcttctcttyttgatccatttatcctgaagttgtttattctctctatgcatgaatgtatatttcactacctatttatgtaccctaaaatatatagtaccattctgtgtttataaaattaccataactgctatcatcctgtaaatattcttttagaatttgctactttcacaagcacaatattttcaagattagccattttgatacatatagctgtagttaattcttgttaactattttatagagtaccactatatgaaca

SEQ ID NO: 743 - DNA, 501 bp, Bos sp.
tggtttgttcctttatctacagcattgaaaatggttacagtattatattactattacaatttgggaaacttattacaactttaattcaacattttcttgttttctgttgtttaatgtaacttaatggctttcctgagaacagaagtaatagagctaataatttttatattatacttactgtttcttgagttgaaattgcattagttcagcatttcccaacctctatttgtgatgtatagtagatgttctakaaaaagagtgtgtggatgaaggatttgagaggcacttctacatcaagtaagtttgcatgacttaagtagtctgtaagaaatttgaggcacattggcattttaaaagtctcttgcaggtcttgaaaggagaaatttttaaatctattaaactttatttaatcccattcttctcaaagtcttctggtcacataaagtttttaaatttgagataggtagagggtagagaatttctattctattctattctatt

SEQ ID NO: 744 - DNA, 501 bp, Bos sp.
gaagctttactttaacatcacatttctatagtcacttgcatagttatattttctaccaagcaaaagtctggtttcttaattttttcctgttataaaactccaaacttgaagacttttattttttaagatatatgtgcacattttataacacaaaaccagtaagtactaaagataaaaactgttggaagcatatactgactctaaaaatcctttctatatcttataagcttttgcagaaagactaacaagakaaattccaagtaaatgttttcatggccaatgaaaacataaggaaacttacaataaaatctaaagtagaagaacatattttttccctgatagcacttatcagtatatctgtaacaatatactgctgatatgagagaggagctaccccgcatccgaggccaggggcggtggctgggaggagctaccccacacccgaggccaggggtggcggctgggaggagctaccccacgcccgaggttaggggaagcggc

SEQ ID NO: 745 - DNA, 501 bp, Bos sp.
ccttacttttgagcttcagctgaatgttgaagctcttgactgtttttcaagctcttttattatcactgaacttatttttctggcatcttcacctgcaaattttttccctttttcaggtctcatgtgagatatcactttcttcaaacttttttctatgagccccaagattgtactgcctattcctatatatatttccaaaagctcctgtacatactcatcaaccaaaattctaattgccaactatgctttaygtccttcagctgatattatatttttcctaacttcatacatcggcagttgacagaatgcctaaaacatagcacatacaatatccagttgtcaaatgactactgtgtgggctatacagtgaaactgatttgtaattgagtgtttattaattcattcacagtgttaaaatgggactgcaagaagctgctaagagaatggcggaaaagtgtaagcattcagtaatttctaataaaaaaaaaaaggtctttagtt

SEQ ID NO: 746 - DNA, 501 bp, Bos sp.
tttgcacagctgttctgtcttattccttttacaggaggcagaaatgactttaaagtccctcagtaataataataaaaatcatggctgtaatttattagtctcctattttacactagttactgcaagagttttacctgcattatttttaattctcagagtatctgtataaaaggtgagtattattacacctattttgcttaataatacccttatagaaagaaaataagacatattatcatttgaatgtcttygtttccatttgtactgtggcaggtatgtgcatttctcatttttctcccaacttttggctaagcagagataagcattactccttccaactagcagataaactagaacaagatggagttaaataacttactcaaatataagagtcagacacatgtctggggccttaatttcaccttaggctattttttcattagatcaatggttttcaaattaacaaactcaacagttacatgcctgtggatggtgactgca

SEQ ID NO: 747 - DNA, 501 bp, Bos sp.
  misc_feature (451)..(501): Nucleotide uncertain from position 451 to 501
acatctaaatgagaaaaaaaaaatccagatcttggcaccatcatagtaactctatggtatattatttcccccataactacaaatgttagaaataccatttggcttctgataaatacctaaatatagaataaaataatttcaaagttattttaaagctaagaagaatcttttttaaagatctctttactctctcttcattttcattcttaatattaaagatggattctctctggggtttgaaattccacaawtaatatccttagaagattcattgtgtattcaaagataagcagaaaaaatacagctctattgaatagaccccagttcttgtctttgaccatgttatgggcctacagaatcaaaaatacaaatggtaaaggccaaagacttactgacaaaagctttgttagtttgttttatgtgtgtgaatgatcatcctctaaaatttatnnnnnnnnnnnnnnnnnnnnnnnnnnnnnnnnnnnnnnnnnnnnnnnnnnn

SEQ ID NO: 748 - DNA, 501 bp, Bos sp.
ctgtaattgcataaatcaattaaatattatgcaaatcaatgagccataagtacaaaggaaaaaaaagggtttcagattgttttttctaggagggaaggtgctaaaacatttgtggaactaggtgtggttagacaaatatatatattaaaaaaaaagaaaagatgagggaaactaaaattctagaattcttggctcagattgactctccagagactttgcattcacactttcacttaaagatatcaaaagayagaattgtagaacatgcaacataaatgtggcttttgtggaaaaagaaaaaaagaaactgtgtggaatgcttatcagagggaaaagaccttggccctacatcataagcatagctaaaaaatgcacatttatatatcttaggttaaaataatatgttgaagcagtgattgtattttttaaaggattatctgctttacagacctttttgattaattggccagttagtgttcagttgctcagctgtgtctgact

SEQ ID NO: 749 - DNA, 501 bp, Bos sp.
acagagtacaatacaagggtctcaaggtaatttttgaactaaattttcacctagatatgatcctgccgaagacacctccgcccatttggggatttgctaacgtgtcacaaatttcccaaattggcattaggaagtattcactggaggagttctacataatctagccatttcaaatctctcaggagtccagagacctcatttcactggccaaatgacaacaatgatagtgcatatattacagatttattgayactgcaaagacatattaaaagctatgcatcaaatcaatgctaacccatttttgacatatcaattatattgtaaaaggtaaaactaccataaaatatacttaatggaaaaatcaaccatggtggacaaacttaaaaataactctaaaaatatttcaaatattaaaacaggaggtggcaagctggaccaaccctaagaaatactagtatactgatttttcagagtcaagttagtatgttagtcactcagtca

SEQ ID NO: 750 - DNA, 501 bp, Bos sp.
atgctaacaactaacaacaattttaagataatacttataaaggtgatatatgtttactatttttagatatggctctgactacctgagtgcaggtacagtttagtgaatgaatgatttatttcactgacaaattctcaaatccaaatactgtgctcccaggtcatttgatcttctcctgacaccagagcatttgcatactaaaatacaaatgcaggcactgaaatcgtacaaaaacactacttatcagtacyttaagtaaaggcagtgaacatactcatttgaaagaatacagggtacctatggaataatggcaccttcctaaatataatgtcattacccatcatacaactatcacagagagaaataaagtgaataaaatggtccataagccatgtcaaggcaggaattgggagacaaagaatacaatataattcaatatacatgtaagtaagagaaatatctgaaactagtgctcagttttgaactcagtcggatagagac

SEQ ID NO: 751 - DNA, 501 bp, Bos sp.
cattttaaattgaccaactaaatataataaccaggtgaataaagtaggtgagaaattcctatcctcattttttaaatatgaaagaaactaagtgacttccctaaaatcagatggtgaatagtagcagagccaaatgaaagtgtaggatttcaaagtcctaatcaaaatttcttaataaaagcacaaaaacaattaatcaaataagtgatgcaagtaattgtcttataccagacaattttaaagctatttcyatacattaatctagatccaagctggcctcatttctactaaatatccctaatgtcatcaaaaaatggaaatgaaaacaaattcaggatgcctatttaaaaaaaaataggtaatgagtgttgccaagtaggtggaggaactggaagcactgtacactgatggaaggaatttaaaatggacagccactgtgaaaaactatacaatgatttgctcaaaaaatcaagcatagaattaccgtatgatccagatatg

SEQ ID NO: 752 - DNA, 501 bp, Bos sp.
gtgtaccacatcttccatatccattcaactgttgataagcatttaggttgcttccatgtcttggctgttgtaaacagtgctgctttatcttatattgaggtgcatgtatccttttgagccatgttttcctctggatacatgcccaggaatggtgatacaagatcatatggcaatttctacttttagtctgttaaggaacctccatactatcctccataatggctgcaccaattttcattcccaccaacagkgtagaattgagcattttaaaagataagttgaatagatttgtgaggagttgcaaggaactttaagcagagcattaacatgtcagaagaccgaagaataactgagaagtgcacttaatcccaaggatcatagttggtttgttctcttttctggatgctctaagaaagcaacataggctggattggcttataaacaactgagattttatttcccacagttctggaggctggaagttcaagatcagggtgccgg

SEQ ID NO: 753 - DNA, 501 bp, Bos sp.
taactatgatccgtttgaaagttttttcaattttccatactttcagtaattatgttgtttatctctcacattatctattagtctttaatcaaattttcaaggctacttatggacataatcagtatctgattaaattatatgtagtaataagtcatccatgggtcatttgcccttagcaactcttcattattggtgtttagacactatttcattctgtgtttatagacaattccatgaaaaaaagaaaccawctggcttcattatagttatcaagattgtgttgtaacaagcaccagagttctccatacatcgtgtagaattatgattttaattgatttatacttcttcctaagatttcaaataaaaagtacttgatattaatgtctcatagttaaaatattattccagcacacaggaaaactaggtcatggccacagtaatttataaactgggaacatgtttttataaaatttttaatattatcattgcttattttgaaaa

SEQ ID NO: 754 - DNA, 501 bp, Bos sp.
catattgactattagtttagctttctgttgtaaccacagttacacctttaccctgaacaggaatctatgtgctgttaggcacaatgattatcagacaaaaattttaaatcaaatcacataaatatttgtcattgagcttccatctttctaatgaacatgagcagaggtaagagtagagtgttaaatgcaaacatggattattcttaaaatacttagatagatttttataattcacactattcagtgttacrtttgtcattcgttctatgtcttcattgcaaatatttgagaaagtaggataacaaaatggaagaatgcaattgcttaaatgtcagtaataagattttaaaggataatggagaaaaaaatgttattactacaacgatactagagagagaaatgtgaaacaagctcaaatacaggcaagtgctttaaagttgcacatacagtgtgatgagaaattgtttttaaataaatggaaacaaaatttctttgggtgca

SEQ ID NO: 755 - DNA, 501 bp, Bos sp.
agcgacttcactttcactttttactttcatgcactggagaaggaaatggcaacccactccactgttcttgcctggagaatcccagggatgggggagcctggtgggctgctgtctatggggtcgcacagagtcagacacgactaaagtgacttagcagcagcagcagcagcaacatacttttgacacaatcccagtgaatctgtagcttcagccctattaactgcttagcatctccattcttttctgattcrgagagatttttatttggtttttgagcccaagtttgtctctttgtttatgtatcattgcttttttttgtttttaatggagcagagtggtgaatcactgtaccagcttaagtgaaaagcctgaaaaatttttgaaatgatcatccatttatttgtaagataccttaaagaaataagctgaaattcagtacatgatgacatggaacaaaagttttacgattatgagacatacatagggagatgaaaagtccag

SEQ ID NO: 756 - DNA, 501 bp, Bos sp.
ttaaagtaaattaattaattctcactagaggagcctccccgccttcctttttccctgtggacgctctattcctatccctctctcaccactttctgtatatttttctactttcccaagactggttctatcctctttctccaaatctttctgttttcactaccctatctgtatttattgaatgattttttttttatcttggtatttgttctactttttgacacaacattttattccctgttgtctgttttaamataatattggttgggcatttaatgtgccacatttataaactaattttatctcctcttacacccatcacatcagttgattcctttctcagtcaatgctcttcaacaaaaacaatccctcctctccacaccttctcctccagactcctatgatgacgtctgacattcagctctcctggtcctcgcggctgcaatcaccgttttccaggccactgtgttttccgagaagtcccagagaggaagacgagggtct

SEQ ID NO: 757 - DNA, 501 bp, Bos sp.
gggtccccgcgggcttgcaccccagcagagggtagactgtgatgttgcctctggtaggaggcagtctgtgggctgcaaagttgagggaagtaggctggcgctagtctctcctgaagaaaagcctgtttctgtaaggtgactaatctctcccttcttctctgtctgcacttggactcgtcagagatggtgaaccatgtcagtgtttcttgttgcctgtcttgtacatgtttggtttattgtattttttacayggggttgtagatccagtttgaacaggtgagaccagatcaccattctgatacaggaaacctggatttgtgctacgtatactttcatactttgattacatattttaattcttgactgttgaggagctttttgatttggaaagtgggctctctttgtcaggagcccttaggtcctgaagtggaaagccaggctgggggactcgcagcacctggggagggtggccctgtgtgactcaagctcctttcaaggctg

SEQ ID NO: 758 - DNA, 501 bp, Bos sp.
gtgtctgggcgggctgtgagagtacggggaagggggagcttaatcagggagtcagaggagttgaatgtgtctgaccagtaggagtgagatacaaagtgaaggaagttctgggctaagtcgaagggattccaggtagctccaaatggcgggagctcagagcagcctgtgaggagtggaagaagataagacagagagagaagcagaaggcaggtcacgaagggctggaggcttgacatttgaccagaaatgaygaggttttataccatgttttttaggaatatagaaccagtgtattggagaaggaaatggcaacctgctccagtattcttgcctgggaaatcccacggacagaggagcctggcaggctatagtctatggggtcacgagaattggacatgacttagcaactaaatcaccaaaacaaccagtgtgtattttataaagatcacctggcagcagtgagcgagcagggaaggaggccagactggcaccagattaggg

SEQ ID NO: 759 - DNA, 453 bp, Bos sp.
catgaaagtgaaaagtgaaagtgaagtcgctcagtcgtgtccgactcctagcaaccccatggactgcagcccaccaggctcctccatccatgggactctccaggcaagagtactggagtggggtgccattgtcttctctgatgctctctcatacctccaaataattactgctactcattttcagaacctagttacactatctyttcttcataaatgtccttaataacatgctttcaagcactttactatatagcactttgtaacatttaaaattggcaagttatttgaatgattttatgataatgtctagctcctcctgtacagtgaaaactctacaagatcagggagcttgttaatgtttgattcctaatgtatacgtgtgtgtatgtgctaagttgcttcagtggtgcctgattctgtgcgaccccatggactataggctcgtctgtccat

SEQ ID NO: 760 - DNA, 501 bp, Bos sp.
tatgagcatctgaatagtgatcagagcacctccagctatataatttcacttgataagaaaggcagtgtaataaactatatgatttaggataacttgttatgcagcaatagctaactgaaacaacaaagcaaacagtaatgagagcacgcataaaaatccactgctttttatttttggcatacatcttgatttggggacaatattcatgattattatttaaacttgtttcagataactagattatcagttgrttcattggtttctccttaatgaggaacttgttctaagaaacttggaatggttggaaggatatgcacattgtgccaaattaaatggtgatctggaatcacatgactaggtagaaatttcagcttgcttgtgagtcatcctttgatcatgaagaatgaaggttcctgaggaggaaggacaaatgaaatcattcagcttgatattgttcattcactgctcatgattctttagtggttatgatgaaatttagaa

SEQ ID NO: 761 - DNA, 501 bp, Bos sp.
tcccttgactatgtgctatttttttcatattttaaaaacaagcaagcggacagacttgaaataataagatgtatcagataaaatacctaataactatacttatcttttcagttttctactgctattgaggaatataattgtgcattggcaggaaagaagtatatttctgctgctcagcatctagaagaggtattaaacactttctctaaagcatgaacaagtaatgctactcttgttttaagtaaattctrtgtcacatgtattccttactgttatacaaatatgttcgaattgcctagagtacagatgaaatgtttaacagtgattccatttcactgccaggcccagaaatgcttgaagttgttaaaatccagaaaatgctttgacttaaaaatattgaaatctctcagcatggagctgacaatacagaaacagaatatactttatcaccttggagaggagtggcagaagctgattgtatggaagttcccaccatcgaaa

SEQ ID NO: 762 - DNA, 501 bp, Bos sp.
aatctgtaggtccgtccatgttgctgcaaatggcttatttcattcttttttatagctgagtaatattccattgtgtaatataccacatcttctttatccatcctgtgttgatggacatttagcttggctccatgccctggatattgtaaatagtgctgcaatgaacaatggtgtacaagtatcattttgaattatggttttctctggatatatgcccaggagtgtgattgctggcttatatggtaactatmtttttagttttttaagaaatctccatactgttctccatagtggctgtaccagtttccattcctaccaatggtgtgagagagttccattttctccacacattcatcaacatttactgtttgtagattttttaataatggccattttaattagtgtgaggtgatacctcattgtactttagatcttcatttctctgataattagaggactgaccctcttttcatgtgatttttaatcattcatatgccttct

SEQ ID NO: 763 - DNA, 501 bp, Bos sp.
gtgctgaaaattcaggggtgctcctagaagcctgcctgcctagtgtgatttgagggttaacatagagtcctcttgttaccttaaatgatatcatttacccaagggacagagggaatgaaattcttatcactggggacttactcttttaaattaagcatttttatccctaggaaccatgattaaaatacaaacacctctgggaataataatgtattacgttatcaacacttaagtataacttatcagatacwtctcctaagataggaggaaaccagggtaatgtgagaatgttactgatgaggtcagtatgcccaaaaatgtaagaaatctgcacagaaatggagccgtagcaaactgaaggaaaatgtgcgtgcttctcacatggaactctgctcaatgttatgtggcagcctggatggaagagaagtttgggggagaataaatacatgaatatgtatggctgagtcccttctctggtcatctgaaactatcacaacattg

SEQ ID NO: 764 - DNA, 501 bp, Bos sp.
cttttcttgctgagccattggggaagttcatatgtgtatttaaagacaattaatatctgtatataattttatatcctaccttactgaattttaaaatttatatatacatatatatttgtataaagattcttatttcaatagcctctgaaagtagccacatccttagctctgtgaatataatcagctcaaacctaagtctgtatgtataaattatttttagatacttgtctatgcataacttttttccaatyttttggagtacacttaccaaatgtaaagtggttactatacaattccatataaagtcctcaaaaatcagctaaaaaatatggaaaaatacttattaagctgttgcaatacataaacacagtgaggcatgtggggattacaaaaaaataaaaagacaaagaaaaaaatgaagacctcaacttgccgagaatttatctaaggagataagattttctctctttctttctcttctctttctatctccacatatat

SEQ ID NO: 765 - DNA, 501 bp, Bos sp.
gtgagatatcactttcttcaaacttttttctatgagccccaagattgtactgcctattcctatatatatttccaaaagctcctgtacatactcatcaaccaaaattctaattgccaactatgctttacgtccttcagctgatattatatttttcctaacttcatacatcggcagttgacagaatgcctaaaacatagcacatacaatatccagttgtcaaatgactactgtgtgggctatacagtgaaacygatttgtaattgagtgtttattaattcattcacagtgttaaaatgggactgcaagaagctgctaagagaatggcggaaaagtgtaagcattcagtaatttctaataaaaaaaaaaaggtctttagtttatttggatctctgatataattggtttatttcttaatcactggaaaagactcttactagatgagaggaaatagaattaaaaacatgaatataatctatagagacagaatctataggaataaaa

SEQ ID NO: 766 - DNA, 501 bp, Bos sp.
cagtactaagaacatgttgggacttcaggatggtgaggaaaggaggctgaaggcatggactgaaggctgacacagcttggttgacttggtgatagtataagagaagtgatgatgcctttcaattttttcttttatgtggaaatattttaatgtgttagacatattggcatctaatagtaggtataatgtagaaggggataaactgaaaataaacccgtatacatttcatactgctcacaaaaaaataaaamgaattaattggaatttgaggctttaagaagccaagggaatgtagtattactatgcactgcaggaactttatttgagctgaagactggctcccgcttgaagacatgacctcctctaaagtgctcttatgttagtgagacgtaccttgcatacttctctgaaaagagactgcctcctctgaagcatcagcaaacttttctttctaaagaaaaacaatcagacattcagaatagacagatctcaaattataaa

SEQ ID NO: 767 - DNA, 501 bp, Bos sp.
gaatatgggtcccagaggatgccctgaggcacaaagctaccatccacagccctgattagcctacttttgaatttttatgtatgagagaaacaaacttctatccgtgtaaagtcatgttattttgttattgttactcagggccaaacctaatattaagtaatttgtttaaccactatcttatttaggaactttcagattgtttcctactttttgctgttattaataatgccagacatgttttcatttttctytaaggtagaattcttaaagctttttgttagttcattttagccagatttgttgaggtttaatgtatgtataataaaattcattctttaagcatactctatgagttttgacaaattcatagtcatgtaacactcactacagtcaagatatagaaagttctgttactcatcccccaattcctttgtacccctttgtcatcagcctatccccacagccccagctccagaaaaacactgatcaattttctatgtc

SEQ ID NO: 768 - DNA, 501 bp, Bos sp.
cgacattatctatttatctatttgactgcattcttcctattacagcagtttagctttccataaggaatataccaattaaaattaaattattctattaaagaagaaaaaaatgtgcaatttctttgagcaatattgtgttttgatttgaatatatgaacaattcaactcaaagctgtcattacttagaaaaataagtggtgaaaacaaggtaattgcataattaacaagtacccttatttgtcctgaaataragtaatgtcatgaataatcaccattatcttccttgaaggtagaggcaaagatataggtattatctgttaaattttataaacacacatacacccgttttgtttcataacttgtatgaaaaccttacatactgaaatgtggacaagttcttagtcttttgagaaatacaacaacctcttgcttattagtccacagaactaaaaagaaattatttcgcctgacatatgcatgatattttggacataaatgggc

SEQ ID NO: 769 - DNA, 501 bp, Bos sp.
aaatatataaagctgacttttcccccctaaaatccactttagctacaatctgcaagttttggtactcaccaccgtcaatagccatagtattatgtattttctaattcctaatttaattaattaactatatcttttacccatgagttattcatgagtataatgttctctaaatttcaaatgctaatggatttttttattagattcagccatgtggaactgctaacattcaatctttttataagctataaagkagcagtttcatatggttcaacatatagttttcttttgttattaatatataacttaatttcatttggtcagacaacattagattgtgaattttaaaccaaaggtaaccacattcacactaaaggtccttgtttctaccattttgtattttattggggtttttaaaaatgttatatgtacatgtgtaaccagtaattttcaataaaagtcctccctgaatactggaatgttttctgatacgtgttgcaggct

SEQ ID NO: 770 - DNA, 501 bp, Bos sp.
gctgttgttgttgttttcttttaatcaatatagtctgttttttgtgtgtgttgcaaactgtactaaaatataagaagtatgcatggagtatacaattataactatgttttgctgaatttaagacatcattaaattgccatttgtagcaacatgaatggacctagagattatcacactgaagcaaagcaagtcagaaagacaaatattatatgatatcacttatacgtggaatctaaaatatgacacaaacraacttatttagaagacagaaacagactcagagatacacaaaacaaatttatggttactaaaggggaaaggaggtgggggagggataaattaagagtttggaattagtagatacaaactagtatttataatatagataaacaacaaggccctactgtacagcacagggaaatgtattcaatttcctataaaaaccacaatgaaaaagaatatgtatacatatgtatgggcttcccaggtggctcagtggca

SEQ ID NO: 771 - DNA, 501 bp, Bos sp.
atgtgcacttgtggttgtatctaaatatctgtacgtgaattccttgatttaaccatatctgccaagattgttagctcatgtaatgtaacatttagacattctaaggattagaagtctaatccccagagtctggggatcattactcattattatttccaccacatgagaactccaagagagagcaatgagactgagccaatgggccactgaaggaaggaggttaactgaggaaacagaagtagaaactagcrttattttataaatgatcccaaaacccagagtaatttatacttagtaagataatacatgatcttccaatctactttgtcctgaagataccttttataataacatatcattctacaaatttccacaagatatttttaagcttttatttttgagtgttattataaaagcacttttgaatattaatgtttttgaaaaacacataatcttaaggtgatactgatctttgtaaaactttaggtaatgtgataagga

SEQ ID NO: 772 - DNA, 501 bp, Bos sp.
actgtgctggatcttagctgtggcatgcaggatctttgatcttcatcatggcatgaggtatcttcagtggcgacatgtgggatatacttccctgaccaggaattgaacctgggccccctgtattgggagcactgaaccaccaggtaagtccctgtattttttattaattaaatataatttttattaattttttaaaaggtaacacattcacacagttaaaaattcaaaagggacaaaaggatacagaattwaaaaaaaataaatcttccctctattctgttctctttcccagaggcaaacattattaccaatttctttgttatctttccagagatcatcttcaaatataaaaacaagtatctgggactgtccatcttttaacaatttcaccataacaaagccttacttttgctaatctgattgaataaaaaatatttcagagttgttttaatttgtactttgtatttttatgagtaaaattgagcatccttttgtatttag

SEQ ID NO: 773 - DNA, 501 bp, Bos sp.
aaatgataagtagaaaaaataacttacttactaacttagaactaaagtttgaacttagatctgcctgattgtacaaatataaaaatatacacacacactttctcctatttctcccctttttggtttaacttgtcttttaaccctttcacatctctcccttgattagcctcctttatacttcatcctatccatacaccttttcatttttttaaaactgggtatgtcctttcatatttgccctcatatcatawgacaatgacagtattaacaacaatcaatgctaatggttatttagagcttattatgagccaagccactaactgccttcgtaagttaagatacacagaaagcattatggagggaggacaggatgggggttcactctcacaaaaatggggtcgtattataccatgttcattccacttgctacataatatcctctgtcatccacaaaattttgactgatgctagccatttatcaacattattccctctgtttta

SEQ ID NO: 774 - DNA, 501 bp, Bos sp.
tcagatggtaaagaaactgcctgcaatgcaagagactctgattcaatccctgggtcaggaagatgccctggaggatgaaatggctagccactccagcattcttgcttggagaatttcatgaacagaggaacttggcaggctatagttaatggggttgcacagagtcgaatacaacagagcgaataacacacagacacacacaaatgtaatgctgatgaacgagcatctgaaatgttgggaatggatcctawgaatatattcttagaattacctttctcagggcctcctttacgtctctgttcctcagactgtagatgagggggttcaacatggggatcaacactgtgtagaacacagacagcactttgttctggtcaattgagtagctggatttaggcatcacataaatgaaggtaatggttccatagtagagagtgactgcagtgaggtgagaggtgcaggtggagaaggccttgtgtctcccttcagtggagtgcatct

SEQ ID NO: 775 - DNA, 501 bp, Bos sp.
agatgatacctgtcaaaactgaaattaaagaaagaacaaggtgtgaaattaaataatgagtcaacatggaaaatgcagccaatgatgattgtggagtcatatttgattaacagatataattcaatttaaagtctccagataaacagcttaagcctaattaataggtgaatgttcttaactcagagcacaatgtgcttcagacacattgtacacaatctgtcttcagatttttttaaagattttttttccarcttcttcttgtgacacttctactttctttcactttgtttcattcgttctcatattaattttccctctttaaaaatgagctaggacatatgctcatgggaggtagaaatattctgtctttaattgtacacctgatgatgactacataaagacaaccgtcactaagcttaatgaagcaggtaggagacagtggtgggcagtaaaggagcagtagttttgttgcagcatttggtaactggcataaaccaaacc

SEQ ID NO: 776 - DNA, 501 bp, Bos sp.
cccgtggatgcacagtccccaaagccagcactaacttgtttgctttggagaggcctgacgaaaataggctgcttttcaacgcaaatagctcattttcttctgttggtgggcagttcatttaagaatagctttttatgtattgtattgtaaaaataacctcttggagaagaatgaatgcctccaagtgactctcccagactggcttttcttccctatagaaatgactactttgatttagtttattgccttcyccaagtcttttttccactataaaatagaaatgtatattttatgtttcttcaagttcattagtacctttactagtgttactgtttcctttcctccatgattgattatctgaaatatttttctataaacatagacacacatgtatttgcctcaaatctggcccaaattattatacaaatggatcttcatttgttcccttcactcatttttatttcctttatcacaaaaaaatatccttgaatcttagtattt

SEQ ID NO: 777 - DNA, 501 bp, Bos sp.
aggtgtttctgcataccactgcactgaaagtgaaagtcactcagttgtgtccgactctttgtgaccccatggactgtgtagtccatggaattctctaggccagaatactggagtgggtagcctttcccttctccaggggatcttcccaacccagatatcaaacccaggtctcccacattgtaggcagattctttataagctgagccacaagggaaacaccactgcactaagaaatgctatttattttgacwatcatttcctcagttatgtctaaaatcattattcatttgaaatccctttttttttaatgtatcttactgccaccttgtggttaaaatgtttttctttcttttttctttacaaatgtgtatgtctatgtgtgtatgtatgcggatgtcatttcaatgaaaatgtaaatttctgctccagagtaatttttagtaatactacccatattcccaatagcagccactttagatcaaacaaaccctttactttttc

SEQ ID NO: 778 - DNA, 501 bp, Bos sp.
tacatatttttcagtattcttacactgtatataaactatagcctatggcactgagtagtccttctcataaatattttaccagcaagatgaggttcctatgtaactttgttacaaagttcatatctacagtcaatacgaaaataagtattcccaaagtgtattaaagaaaaaaaaaaaaaaaactctttggatgtttaaaattaaaagctttacaatgttgaaaagtgatgcaaacaacttttcctatgtgmaaattggagtaatacacaaaataacaagggctttgctcagaaatcacataaaaattgatttggagaaagaagtgaaagagagtagttgctgccacttaacctctcaactaaccattaaacaaagggctagagccttgaaaatgcctctgcctcacttcagaaaggcaatgccaaagaatgctcaaactaccacacaattgcactcatctcccatgctagtaaagtgatgctcaacattctccaagccagg

SEQ ID NO: 779 - DNA, 501 bp, Bos sp.
taaaagcgatatcatataacacttctctgtcttactttacttagtatgatgatctccagctccatccatgttgctgcaaatggcatcatttcactcttttttatggctctgccaatggcatcttaatataaggtgtgaatgtaacataaatccatcttaacagaaatcctagaagacctgagcagagaagcagcttgggagcagggagagaagagaaatctgaattaatttcttagattaacattagaaawtttccaagtcagggaagaccaagtacagcagtgacgggaaacagtgcttgctagaactagggtggctcccccagtgaataaccaaatgaagctggttgataagtaagtaataggaacccaggaaagctaaagtgaaatctatatataggcctgatgctggctgaagctaaattagcaaattaagttctgagagaagcaagatggaaaaaataagtccggcagggaccaggtagacagaaaagggaccagg

SEQ ID NO: 780 - DNA, 501 bp, Bos sp.
gcttttggtgaagattgataaagttatgaaaatgctcagagatgataaaaatgagacccctttggcctggtgtcccagaagcatatccattgtagagcacttgctttgaggataatagacacatcagaacgagatgatggtttggaagaagttgccgttgtgtagttgatttgaacagtggagaatattaactgtttttcagggaaattttagtttatttgtaaatttaggacttttttcccaacaatttmtttgacagttttatttttctgttgggtttctttgagttcagtttacttgtaaacatttctatcaacaacctgctccacagtcaacctgcctctttggaattacacagcctttgcttaatctaattctaatgtataatccacaacttccacatgtactttattattttcagtactctacaatccaggatatggttttatccctctcagcctaatggaagaacattatcgtcctcatttttcaaaaaaattg

SEQ ID NO: 781 - DNA, 501 bp, Bos sp.
ttagagctcctcccaaggaacagaaacaagagtggccccagctggattagttggataaatggatttagaccagaggtttctaggatagagactctgcgggagctggcctgtggtgagcacgccactggcctgagaccttcgcgagccccctgagtctgtctgtcctcatcggtcatgtggtttacctaagcagaaccattacagatatcaaactatactctgaaaacctgactactagaacattccactawtttttaaaaatttgcaacttttctccaattctcactcaagacacttcacccccttccacaattgttaaggtaaataaatagaatgttcttaactacaaattagatatctagcttagtactaaattatatccgcattgttgatttaatatatcacaatttttccatgttcctcaaacagaaccttgacttccaaaggcatcttcctctcagtaccagggacctacttctccaggaaggtgataaatagcaa

SEQ ID NO: 782 - DNA, 501 bp, Bos sp.
gttggacacgactgaagtgatgcagcagtgcagcagatggtttattacaggatattgaacatagttctctgtactgtacagatggtttatccacgttgttcatccatcctatatataatagtttgcctctgctaatctcaaaactcccaatctattccccttcctacccttttcctccttagcaaccacaagtctgttctctatgtctgtgagtctgtttctgtttcttggatgagttaatttttgttgtrttttagatcccacatataagtgatattgtatgatatttgtctttctctttctgacttacttcacttagaatgatcacctccaggttcatccatgttgctgcaaatagcattatttgcttcttttttatgaatgagtagtgttcccctggatatatgcaccacatcttctttatccattcatctgtcgctggacctttaggttgcttccatgtcctggctgtttagaatagtgctgctgtgaacacagagg

SEQ ID NO: 783 - DNA, 501 bp, Bos sp.
tcattttgactcttaccatatgagatcttacttctttgtagtaaattatttgaagacaagggcagtatcttagtcatatcctcctctctggtttcaagcatagttgagctgtagtatgtatattttgactactttaaaaatatatatctatttcattgatgtataattgataaaattgttagatatgtgaagtatgcatcttggtgattttgatagaagggaataatgtgaaaagattcctcctatctacytactcatatatttatcttttgggggagagctgatgagtaatttttcttagcaagtttcagttgtgctatacagagttatcaactatactccccatgtcgggaagatcccctggagaaggaaatggcaatccactccagcactcttgcctggaaaatcccatggatggaggagcctgataggctacagtccatggggtcgcaaagagttggacatgactgagtgacttcactttcctttcctttccccatg

SEQ ID NO: 784 - DNA, 501 bp, Bos sp.
cactggaggagggcattgcaacccacttcagtattcttacctggagaatcccatggacagaagagcctggtgggccacagtccatagggtcagacatgactgaagcaactttagcacagcacagcacagaaagggaatagggagtttttgtctactaggtacagtttccgtttgggatgatgaaaaagtcctggaaatgaacagtgatgatagttataaaattatcataaatgtacttaatgccactgaaycatttaaaatggttaaagtggtaaattttatgttatgtgtattatttatttatttggctgcaatgggtcttgcttgcgacatgagggatcttctttgcgtcatgtgatatcttagttcccagatcacagatcgaacctgcataccctgcaatgcaaggcagattcttaaccaccagaccaccagggaaatccctgttacatgtgttttaacacacacataaaactaaaaggagttggatctcagtttttt

SEQ ID NO: 785 - DNA, 501 bp, Bos sp.
tcttaaaatagtgaatagtgataaagacagtctcttgcgactacttttgaattaaatgattttaacacccgaaaatgtggtcaagaaaattctattcaaagccaatttactttagagtgaacctgtaaaatatttcagtggaaataaagatgtcaaagtcaagtacacttgattctatttgataatgagtgttagttctgtatgatcttttttctcttcagagtggcaaaaataactgactttggaagatkcaaagtcattcattcattcaatgtgttcacttctaaggataaattctttattgacttttctcttttggagatgaactatgtatcttgtcttacaggggaattaaatggtcattttctttacatcaaaacacagataatgttgatgggtcattaagcagtctcgatattgtgaatgaatatgccagagtagtgtatacagatttagtttcacaagttttattatatgttggtaatagaattatcaaatacc

SEQ ID NO: 786 - DNA, 501 bp, Bos sp.
ctaattcttcctcagtagtcttcttccttctcccctgaggtcagtttcctaatatttcttttttgtttttacatgtaaactttagaatccttaggatactgttatttaattagcacagcatttaagttataaaagaactgtttccaggtgtctctcatttgcattttgcagatttatttcatttattcctaagcattctatcattatcaacaatgatttatttgcttctatcatttaaatcgttttttttkttgttgttccgacataacaaagctgctgatatctgcatatttttttaaccccacaaccttgttgaaagtattttcagttgattctcttgtgcttttctgggtatacaaatagtgatcaacttgccctcttttaaattcttatgcatctaactttttctttcataacattttattaatatattggtacaatgttaagttatatggatagtggtggcatttttacattactcctaacagtataaggcttcct

SEQ ID NO: 787 - DNA, 101 bp, Bos sp.
ttaagattgacaataatagtggggccattttcattttagtgtttttaaagmgtccactgtaggcatttaaatcagccaaagaattttgttatcttaaagca

SEQ ID NO: 788 - DNA, 501 bp, Bos sp.
acagcaagagtagatattcagagggttaatatataggattgtcattttattttgctgaatttgaatatataccatctaccctatactgggcaagaacaaaaacagaacaaaacaaaaaatgaaagaatctagattacaaatcataagctctggatttgaatcccagatcttatattactaaggaaaatagatgggcaatgtaatccttcttgatatccagatctctgtgtttaataacgaaaatacagatrccatatcattgtgaagatgaaaaatgagacaatatacataaaactcccagatgataatggaaataaagaccaaagtactatttgagttccatcatgggtgtggagctataggcagggaaaacatgcaagaataaatatgaatatgggcaaatcacacagtgctgttggaagaaaatagccatttaaagtcatttggatttatttaaattataggtcatattaatagaaatgcagcaaataaatttgggaa

SEQ ID NO: 789 - DNA, 501 bp, Bos sp.
ttgcagctagagttttggaatcacattaaggtgtccgtggggaagaagtgagattgggaaggctgctctgatgattcctgctggaaagcaaggtgatagtgatctgtttctgcagcaccttcctgctctccaaactccagctctgagagcatctagagtcagttgttgaaagcatctttcaggccagcttcgcagctatcatagtatgttcttttcccttataaacaactttgttggtggtatattttacrtatcctgagatttatttattgcaggaatatacttcagtgatttttagtaaatttacatagtgatacaaccatcatcattaatcaattttagaacattttcagacccccagtaaaatgcccatgcccatttacaattaatctctctccctacccttagccccaggcaaccactcatatacttcttctccatacatttgtgtttgctggatattttatacaaatagaatctataacatgtggtctcttatgc

SEQ ID NO: 790 - DNA, 501 bp, Bos sp.
tacagaatgctttgaaaggcaataggagaaaggggatcctgaaataccttgtgaacagccagggctcatgattgggattcatttccaggcaatcaatcagcttgttgattcaccaaatggaactgttgtttaaaatctgaatgcttggttcaagagccactgactgctgtcacttgagacactataagtttcagcctacattagctttatggttgtagaaaggctgaatatcttaatgaaatcaagcctcyttaagtgacctataaattcaatatgattttaatcaaaactttataaatttggaatatttaatgtctaagaatagctaagaacccataaaaaaagaaacatatttgttattgtaccaaatccatagttattataaggctataatattaaaaatcatgtggtattagcacagggaaagtaaaaagagaatcacagatacatggaaacttcagtgaggaaagggtggatttttcctaagccacatgatgatca

SEQ ID NO: 791 - DNA, 501 bp, Bos sp.
aaattaaataatgagtcaacatggaaaatgcagccaatgatgattgtggagtcatatttgattaacagatataattcaatttaaagtctccagataaacagcttaagcctaattaataggtgaatgttcttaactcagagcacaatgtgcttcagacacattgtacacaatctgtcttcagatttttttaaagattttttttccaacttcttcttgtgacacttctactttctttcactttgtttcattcrttctcatattaattttccctctttaaaaatgagctaggacatatgctcatgggaggtagaaatattctgtctttaattgtacacctgatgatgactacataaagacaaccgtcactaagcttaatgaagcaggtaggagacagtggtgggcagtaaaggagcagtagttttgttgcagcatttggtaactggcataaaccaaaccaaccaacagaattactgtattgtcttttagtatccatgtatttga

SEQ ID NO: 792 - DNA, 501 bp, Bos sp.
atttaaaaatattatttacgcttactgtatccacattgtcacttttaatttattccttaatatttcatagtaatcacacttattaagtcaacattgacatcctagatgccaaatctaatgagttattttcaatactcatactattgtagaaatatacaacatttgcatttgaccattccccaatcctctcttaatttcttggagagcagtctcacgtagttctcctgcttttaggtcaacatcaccattgytgatttttcttctacattacattaaactgtgatgtccctcagacatctgtctttagttatactactcttaatccatgcactcatgctggatgactttattctcaagtttcaattgtcaatctataggtcaacaattcccaaatctttatctcattagctatatttccagccttttatatctttacttgatatccttaaaaacacctcaaacttaacatgtgcaaaattgacctcagtattttcccatttc

SEQ ID NO: 793 - DNA, 501 bp, Bos sp.; identical to SEQ ID NO: 72

SEQ ID NO: 794 - DNA, 501 bp, Bos sp.
tgccaaataagaaggtattttgatgaccaccaagaaacttttttgaattatttttcaggctagaatagctagctatagaagaatccagtaaagtgtatcatttagtgagaaactatgaattccttccagacattacaaacttattaaacaacaatagccaatttagaacacaataatagtattttttgcagatttaccagagaaaattttttaaaaagggaaaaaaacagtattattttccttttgatttkaattttgcttttgatgccttttattctctcttaaccatttttctggaaagtcaggtgtacctaccgactatacatacatcagttggcagcacactttaatatgttgcttggatacaggtgtttggaaatataggagcacaatttatacctgactctgttagcagggaaaccagggctactttggaattttcctttgggaatcatgaccacaaactggaaagaagtcttaaagttttagaagaatgaaatt

SEQ ID NO: 795 - DNA, 501 bp, Bos sp.
aatctgaaacagactatcaatttttaaaaataaaaggtaaaatattattacttgtagaaaatatgattccatatttgaaaaaagagaattgaactggaaagttattacaaataaagacatatatttacatagttaaatgaatgtacattcatatgtataaactataaccaattaaaaaatacaatagaggaaaatattaatagtctcaaacagagcaattgttatagaaacaacattataagtatctgtargtgactacaaggtgaaaattttttagtatctgttgaaagacatagtaatagtccttccataaaatgcaatctatcctgtttttataaataaagattcaaattgtgaaagtgaaagtcggtcactttccaactttcggaagggacacacaaaatcagttatgcccaactctttgcgacctcatggactgtagcctgccaggttcctctgtccatgaaattctccggaccagaatacttctctagggcagca

SEQ ID NO: 796 - DNA, 501 bp, Bos sp.
aaataaatgtctcgtatgtaatgtataatatggtgactatagctaataatactatgttgtctatttaaacattgataagatagtaagtctcgaaaagcctcatcacaagaagaaagttctaaatatgtgtggtgatggatattaactagatttattgtggtcgtctttttgttttatatatacatatgtatataatttttatattgtacacatgtaactgatatactgttatatgccaattactctcaatwtaaatttttctaaagtcatatggcagaaggtgaggcactattggtctatacccaagagaaatgggggaaactggagctgcagcctcagtgagcttctcagtctgagatgctgacaaaagtatcagcaacctggctccattaccacagtaacagcacaaactattgcttagatttgtgttagcaaattgacgtcttaggatcagttgagttagtacataaagtgagttcaacacagagggcaatgggggag

SEQ ID NO: 797 - DNA, 501 bp, Bos sp.
ttttataatataaatacgagtggcaaagtgccgttttcctggtgttaatctagctctcatctcattttttcctttggatcttgcttccgttcctactgcatctacttagtctggttaagatttctcaattccctgcctactatagaatagaattcattctgagaaatatcaccctccgtcccttccttttcagtacctgaggcaaaaataattgactagtattttgaggcttagagtttagggtttttttktgtgtgttttttttttaatgtgttaacaatatgggagaactatcaggacaaaaattacaaataaacaagggtgatatgaccaggtttccaaaaatgtacagtaaaatatgttcccagttcttagattttaagtgggaccagtctctgatttttctttatctaattccacaaatattttagtcatttcttagtgaatatttatgatacttcttctccctacaattattatttcttctttgtgaccttgggg

SEQ ID NO: 798 - DNA, 501 bp, Bos sp.
tttgataatattctatttactgaactggttgtttgcttcataggtgtgtttagtttgtaaaaattcagcaagctatttgcttatatttgtacatttttctgtttgcatatttaatcattttgtagagaaaatgaacagatttaaaagacataagaataaactataatatatgatccttaatttgatctaaacttcacaaacaatggctacaaaagacatgaatactgattagatattaggattgaactggrcatctgaaatttcaatatgatctagtattggataatgttagagaattacttttagttgtgttaggtatgatgatagtacttagattataaaggagaatattatttttctagagaagcatgtatttgtgggtaaagtattatgacatctcatttactttaaaattgctcaacaaaaagaaaaagtgaaataaataaggcaagatgttaaaaacttttgtttctatgcagtggatatatagatattcctgtt

SEQ ID NO: 799 - DNA, 501 bp, Bos sp.
gagtgaaagagctctaattaaaattctctgagaaatcagcagtagcaattaatgaaacagaagaggaaaggagcataaaaatagtctttaaagaggcctcatcaaactctggaggccaaccaacagggtttctcttgaacaacaggaggcagagaattataaatttataaaaacatcttgtttctctggtccccaaattgtattctgaagcaggaagtacagacttcttgttaataattcccaatcttgtscaaattaatgcacgttaaaataaatcataaagttgagttagagatctcattaattgaagccccagcacatattttagagaatcttaattattgggctaattactcaaactccactttttacttttttgcagaaaaacagttctagattagaatttgcttctttgaggtagtagtgtagagatgtgtgcttcttccagaactctgggtgaagaatgcatttttagttatcatcgggaatatattaaggact

SEQ ID NO: 800 - DNA, 501 bp, Bos sp.
attattgggctaattactcaaactccactttttacttttttgcagaaaaacagttctagattagaatttgcttctttgaggtagtagtgtagagatgtgtgcttcttccagaactctgggtgaagaatgcatttttagttatcatcgggaatatattaaggacttaaagtactgggcttggtgaaatatgggaaaatgtttattgcacctgattttgcaatgagaaaagacttgtagtaacaggaaataarcaatgacaatatataggtgattaaaatgccttaattaggatgttttgtttgcatttttatggaaataagggagtaagagtacatgactttattctagtgtacttttgaatggaaaacagtctctgtgttgctgctgtttgtcactttctgtatttctgttcagtgaagtctgtgttttccttgcaaacataatctgtattaaaatctggtttgtttttcatgttccaaataaactttgtttacacaaaca

SEQ ID NO: 801 - DNA, 501 bp, Bos sp.
ggacaaccaccttaccagaataattagtagactgatctcaactaaagaaaaagaaaactcaatcccttacgttagttacatatgtgattcttatcctcagaaatgaatccgtttctttaaggacctttcatctcttgtgccctacattgtgtattctcttgtttctctcacttcagctaggaaatgaagccactcgttatcaactggaaagtattttaggaaaatggagtaagggtttgagaaacataaayattaatacatagtataagaggatgaaagttttgaaaacaatgaaaccagataaatactattaaatatcccaaaatcagtacaaagattacttttctactttattatggaaatttaagaaagccaatgaaaaacaaaccacgaacttaatatttgggagagggaaagagaattattggttgcatggaaggataggccataggcctacgtgacattcctattagtgtttctgataggcactcatacacagta

SEQ ID NO: 802 - DNA, 501 bp, Bos sp.
  misc_feature (461)..(501): Nucleotide uncertain from position 461 to 501
aacctctatttgtgatgtatagtagatgttctataaaaagagtgtgtggatgaaggatttgagaggcacttctacatcaagtaagtttgcatgacttaagtagtctgtaagaaatttgaggcacattggcattttaaaagtctcttgcaggtcttgaaaggagaaatttttaaatctattaaactttatttaatcccattcttctcaaagtcttctggtcacataaagtttttaaatttgagataggtagrgggtagagaatttctattctattctattctattctattcctgcagaatatgtttatggttgcctgtatttcctgctaaagttcagttcagttcagtcgctcagtcgtgtctgactctttgagaccgcatgaactgcagcatgccaggcctccctgtgcatcaccaattcccagagttcacccagactcacgtccatcgagtcagtgatgnnnnnnnnnnnnnnnnnnnnnnnnnnnnnnnnnnnnnnnnn

SEQ ID NO: 803 - DNA, 501 bp, Bos sp.
ctctgtggataaggggggactattataatcatatttttacctggcctgacatttaacaaagtcttcaaaataattacagttgcatatttatttttaggtggcctcttagaatatctgctaagttctcaatggaatgaacatcacatttattttctaaagaggcataaggggaaataatataaacttagatttgagatttgcatctttacttacagaaacttttaaaactctagccttatgcaattgaggcmaatataaaaaattcatgagtaatataattgagacttttcttatggttgcaaaagcttttttgaaggctatttcagtacacataaagtaaaatggataaatgaggcagttgtatatattgtttttaaaatataaagaaatcatttgcttcaagttgagttttttttttcaatgtaagttgttcaaagtatttctgaggctctctacttctattcatcattgactatactgatataattacagagctgcaga

SEQ ID NO: 804 - DNA, 501 bp, Bos sp.
taaagtattatttcaaggaatgttgtgccatttaagatatgccacaagggaatggcactcactttctacttctctaaactattattcttcctctattatgggtctcctttggtaactccttatctttccccatatgctaaaccataaaaccatcctcaaaatcacatcctcatattcccacattcatcaaattccattaaacctattccacttactcattcagacaaatattattaagtacttgataactkccagggaatttgatacatggtgagatgagaggagaaataaatatgcatgatccctgacatcatggatcttatggactcatctagagagagacaaacattaatcaacttcacaaacagctgcagttataccacaggtacatgaagaagttgttactgctcctagtacatatattaaaacttcatgcagtacatatatacaatggagtattactcagtcatacaaaggaacacatttgagtcagttctagtg

SEQ ID NO: 805 - DNA, 94 bp, Bos sp.
gtttaataaattaaagctattgattatgtacacaatatacttttggaaaayttctttatgttcaccttaaatgtgaaaataaatcctattttct

SEQ ID NO: 806 - DNA, 101 bp, Bos sp.
ataaattagtttaactttccttttctatttatcattccatatccaaccctytatatcaaatgttttgtcatgatttttgtataatgtttataactatttta

SEQ ID NO: 807 - DNA, 501 bp, Bos sp.
tgaatccaacagccacatggcaggtggcttgttttccacattgacagaatttatctctgtctatataatggccttgctatgtgatgcaaaaataaccacatgcctttttgacccatcaagcaagctattttaaaatgtctaatcttttggcttgtgtagctttctaagatgcaaacgcaatgagcttcctcacattttgtgtctacattttatgacataatgaaatcttgtaaagtatttatgtttgattyggggcatttattagaatatcaagcaattacttctccctctaatgaagaaaatgatatttacacccataataaatgaaacaaaaataatgtgactattatttgagaacaaaatcaagttacctactgggagataatagatattttagattaaaatcataaaatagagaacatatgtcttggaaaatttagaaagacatatttatgttagatatcccaataggattgggtttttttctacttgcagtccaga

SEQ ID NO: 808 - DNA, 501 bp, Bos sp.
tgtcagcatttaataaaagctaccattttctgcgaatgaagctgtatttcaggaactgttctagggcctatacatttattatctctgaaaccacatgataatcctaaaaatctagatgttttcatccttcatttactgatggagaaatagcattcactcattaaaactcagatccagattgacttcaacgcttatccacccaaacctcatacactggtcaaaagagttctatatattacaaacatgatatktaagaagaaaagaatagcaacaacagaaaaaaaaaatcctataaggtaacaaagaacaaggaacaaaatgaggagtaataattgcagttggaaaaatctgtaaggactggaatgatcagatgagtcttcaagaaagaattaatggagaaatgttaatacattatatataaatggatagaaagtcagtaaaatcaaataagcatggattgttgttttctagacaacttttttaagttcaaaagatgtttat

SEQ ID NO: 809 - DNA, 501 bp, Bos sp.
caaagacccagttcagaaagaggttatcaggtaccaacaccatagtatgttctcctgtgttcttttttaattagggtgtggaggtgaaagcctttaagacattttttaagaggacgatggaaaaagatgattctaagaagttatgctgtacattgtaaaggtaaaactctttttagttttctgcttgctctttgtcttgttctttgtatttttgagagattgcttgtttaaagattaaaattgcttttttwaagtatttttgaaattgcagacaagggtcttttatttttaaagcctgtgttgaaactggtccacacagtgacttcatcttacacagtcatgtttagatatttatatttgtttggccttttccttagagtaatttattcaatgtatttagtatttgttaagtgcaaaacactcaacctggcctgtagaaaatttaaagatatcagacaagggccctgtttccaaggagtttaagctggtataattaccatt

SEQ ID NO: 810 - DNA, 501 bp, Bos sp.
taaaaaatgagaaatgaaaaaccaatgaccattacatgatcattttccaaaggacacaggtaattgagcaccagtaaaaaaatatacatattctcccaaagacaaaatgcttaaatgactgccaaatgaaaagccgtattaagacaattttaaatgactttctttttaaaaaattaacttttgtcatagaaaaattagaaactacagagctgaataaagaaaaatattagcgtcatttgttaatttcatcmctctgaaaattaaaataaactataatcttgccacttaacatctgctatatactgacttttttgcagtcagtatatacacatacacgtatatagacacgcaaagttacctgtgtatgtatatttacaagtgtatatatatatgtgtgtatatatacctacttttttcttacaaaaatagaatcatactgctttgtaaagtgctttgacttaaaactacatcatgaacaaattcatgtaccaataaataaat

SEQ ID NO: 811 - DNA, 501 bp, Bos sp.
tcatcatagcagataattgtttgaagttgaattttgtttgtcagtgtttcatttggaattttcacagatatgattctcaataattagggcattacattagtaaggattttcaaacagtgaactgtgtggcccttagtttccacagaggccccaagtgtatctgaggatgagaaataggaataggaaggggaatcgaaaaaggaatagcaactctttaatttgacatttttattgaaatgattgtagattcrcatgcagttataagagatagttcagagagattccctgtgcattttggccaatttaccgcattcgtaacattttcaaacttgtagtatcagaaccagaatattgtcattctgtaatccagggtcttattcagatttcctgagttttacttacactgtgtgtgtgtgtgtgtaggtttatctaagttcacctgtgtagattcatgtatccaccagcaccatcagctactcaacagtccagtaactacatagt

SEQ ID NO: 812 - DNA, 501 bp, Bos sp.
  misc_feature (501)..(501): Nucleotide uncertain in position 501
tgctgtttggatcatgtttgcttgtaaatatcgctcagtactataggactaagtttctataagactatacctgtgttttattagagttttacacattgtattgataataatactaggtatttcgaggttgattactttaaaaatcacaatctggcttcgatgtcatatttaacttttgtataagcctcactaataatgtttgaaaagtatcatgatgtgtgtataaaaattaaggatgaaaaacttgtatraatctgagaggatgttagtataaattaagtgtttatcttattttaataaatactactttgcttataagtagtcagtagtttaaatatgaaaataaaatttacttagttttctttgcattaacaggtaatcggaaagttatttgcctaaggatttgagccatagtgaagttaatactatcattatttttcatagagtaatgggattattttatataaattaggagaaattaacttcacaacatttatttan

SEQ ID NO: 813 - DNA, 501 bp, Bos sp.
taataaataataatatatggtccatcatgggggctactgtctaaggagatttaagatttattgaaattctcttgtctcagtgtatttaagaaatataggaagtgaccgtttaaatcccttgcatgttctatattaaattccttgaaaagattttacaaattccagattttaaaaaatttgtctccaactgcactgatttgttgcctccagcaagaatgagatgatgaatcctttcctctttattttttttyccaagtattttaggaattttaaagtgaatacaactgattatatcaaaggcattaactgtctaatgcagggatgttgtgtgttccaacttccaaatgcataaaagaatgcagtcttgaaatcagaagtcctcacctaggatgtctactttgtatggaaatgaatgtgcttaagggataaacaaacagaactttttcattgttgtgttgttcccctttgcatgcatagaagacaggaaatacattccagtac

SEQ ID NO: 814 - DNA, 501 bp, Bos sp.
tgccagtaaaattaatatcttcatttaatactgtttttaaaagctatgcttagtacacaaagaatagtcttattgggcatacacttctacatacttctgttatattctccacatctgtctgaccttaagagagtataagatctttctattatatcatataacttcatcaagtgtaggttgatacacaaaaaatgaatttcagatggattgtaggtctaaaattgaaaggtaaaaaaacaaagcttttaggraaaaaaatgagactattttcataatcttgagttggcaaagattaatcaaagaggacaaaaacagttctaataataaaggaggttacttataaattgcactgttaatattaagaacttctatatcttaaatcattcagtgacatgttaaaatgaccacactatccataacaatctacagatttaatgcagtctctatcaaaatactacggcagttttcacagaactagaataatcctaaaattcatatgaa

SEQ ID NO: 815 - DNA, 501 bp, Bos sp.
tgtccatgtgtagagtcttctcttgttcactatgcataataaatctgttgtctgaatatttgaaatccataaccagagtgaagacttatctgataaatatgcaagacccagctcaagagcaaacagtggggcaaattctggcatatcatagccacaataatcctaagaagatcctagatacactatggaacataatgaaccagctgaccaaatactacgggtgtcaatttggcactaataatctaaataartaaaagattcacacattagaatttggtatatgctgagaagtatttatgttgaagctgaaagacattccactgctcttgttatctgatcaaaaatcttctctggctccaaaattcatccttgtctttagattaatattagaatctgcctacaagaagcagaaggtcattcaccaacagatagttggttaatccttactttcttcatgtagtacttgttcctcaattgctagtcctcttggtaaatacatta

SEQ ID NO: 816 - DNA, 501 bp, Bos sp.
tcataggtgtgtttagtttgtaaaaattcagcaagctatttgcttatatttgtacatttttctgtttgcatatttaatcattttgtagagaaaatgaacagatttaaaagacataagaataaactataatatatgatccttaatttgatctaaacttcacaaacaatggctacaaaagacatgaatactgattagatattaggattgaactgggcatctgaaatttcaatatgatctagtattggataatrttagagaattacttttagttgtgttaggtatgatgatagtacttagattataaaggagaatattatttttctagagaagcatgtatttgtgggtaaagtattatgacatctcatttactttaaaattgctcaacaaaaagaaaaagtgaaataaataaggcaagatgttaaaaacttttgtttctatgcagtggatatatagatattcctgttacttattctttctgttatatgttgaacttgatcacaa

SEQ ID NO: 817 - DNA, 501 bp, Bos sp.
aaagtggatcttcagaatcagactctcggtgctctagaccagcacagtccagttgtgtatgatataagccttgtgcataattttgaatattgtagtaatatagtaaaaaagtttaaaagtaaacagatgacattcattttttatttcaaataatgctttagtaaatgtattagtttaaatagaattaaatatctaacataatttttaaaaaatgaaatataatttatatattgtgtaacattaaggtatayaatgtgaggtgacattagttttaatagtttgtttaactcatatccaaatattatcattttaccatgtgatcaatataaaaatattgatgagatattttaacttttctgtcatgagtgtttgaagtttagtgtgtattttacaccttcttcacatctcagttacgaatagctacatcttaaatccactccagtactcttgcctggaaaatcccatggacggaggagcctggtgggctgcagtccatggggt

SEQ ID NO: 818 - DNA, 501 bp, Bos sp.
gaacagaaccaccacagagcacgcaggctgggacagtttctccatttacaccttttgccttcagaggcttctgggaaagcccatccctaattaaagattttaacaagcatattgccagctttctaacactgttattaaactgctctctttgttagaaaaggtgctgtttgtcggcagtttgtagatttagatatttagtatgtgtgtctgtagcctgcaaaatatttgtgtttttagaataattcaattartatgttctgcatgtatgtacctgtgtgcacaataaacatagcacacacaatataaaaattctgtataacaattcagactcacaaggacaaggaaccatggcttattttcatgaatacacagacttctctacagaacaaggtagaattggatattttaaggttggaactgttaaaacaatcaggttgagatcatgactctgataatttggggccaaggcgaaatatcttttacttgaaatatctgcatact

SEQ ID NO: 819 - DNA, 501 bp, Bos sp.
ggaactactgccttaaatgtttcaaagcatccataggacactcacgcttttcaacatcacgtctcctctatttctgcaaaattggtttctgctgatcatctctttcttatttgtcacctagggtgacactgatatgattgatactgtttcctcacttctcaacggtcccttaaatactgtcttatctttgacatttcacttatctctgccactttacttgtcagttatttatctcatgtattaatgatttmtttatttaatcgtgaccttcttctgaaaagttccatgtgctgatgtacattttttttggtatcaaaaaatattcagtaatagaagtggagagaatttatgaaaaaaaatgatataagaacagttcttaaaagttacttctctgaagcacatctcaaaccactgctgtgtaagaaaatctattcacacagggtatacctttgattattttatgtaaagtattatttcaaggaatgttgtgccatttaagat

SEQ ID NO: 820 - DNA, 501 bp, Bos sp.
gagaaagcagacacacatcttttgtcctgtcttctccatttcctccatcctggttcagggtgtgatggctgcgtatgagggttggagggtcgtcttggactgtgagctggcaccatatcctgggtatggctgagtggaaaactgaaaggaatatgggtcccagaggatgccctgaggcacaaagctaccatccacagccctgattagcctacttttgaatttttatgtatgagagaaacaaacttctatcygtgtaaagtcatgttattttgttattgttactcagggccaaacctaatattaagtaatttgtttaaccactatcttatttaggaactttcagattgtttcctactttttgctgttattaataatgccagacatgttttcatttttctctaaggtagaattcttaaagctttttgttagttcattttagccagatttgttgaggtttaatgtatgtataataaaattcattctttaagcatactctatgag

SEQ ID NO: 821 - DNA, 501 bp, Bos sp.
atactaaaataagatggcgattttaaagttcaattaatgaatctgtcattcatgaaaagcttaagttcttttccagttgtccttgaagtttaaggttatgtatgataaggccaaactccaacaactgcctaatttatgaacaaccagtagaccattatagtttctcatggtaatttaagatccaacgttttttagtcaaaaacaatccaaaactcattagataattttaacaaacttgaagtacaaataamtcatttttgtcattttattccagcattccaaatttaggtttagaagtagtccttttatctgtgatccccaattgaatactcatgcttaattatttaattaaaaatgaaacaattaaaaaaaccaaagacatcactcagtcactagctgtcagctagattcaggccagtgtagctacctgtctgtcatcatatacataagtatggttgtataaagagaggaaagaatagtgtggcttctagtctgcagtcg

SEQ ID NO: 822 - DNA, 501 bp, Bos sp.
ttaaaagtccatgaaaaacttgaaactttattcattttgtccaaaacatttttccctaaattgtcatttctcctctccatgttcccatatatcttccatctgccaaagaccagcacaatccattcttctttacaaggtcttacctacatccaccagtgcattgtcactttgatgtttccccttttatgagctgtgactgtctgttgtttatctttaactcaagcatatctaatttcttttatttgcataaygtatttatggtttatctccctaagtgactagttcaattctaacattttttttttgcatacttcctttagtacattattagatatgttagaaacttaaaaactatataaatagttattttggtcagtagaaaattacatcactaataaggctaatcttaggattaaagcatatatatgtacatatgatatatataaaaagtctggctagccatgtttttgttctgcaactgcaaaaatgtacttccaagtc

SEQ ID NO: 823 - DNA, 501 bp, Bos sp.
tttgcacccaggtctggcagcctcccaagctctgggctttctgtggaactctgcaagcctcaggaaggtggcatggcctccactacacactgccagtggagaaatccagaccacctaaacatattagaaagagaaattcctgattgtcttgggcatgtgggttgtaggcatgagaaatccaattgtgtggaataggaatggtgcttggttaatgatacctgagacctgaaaaacaagggcttaaataaatwaggagtgaattattcaaaaataataataacaatggccaacttttatacagcacctccctggaggaggagatggcaacccatggaatcccatggacagaggatcctggtggcctacagtccatggggttgcaaagagtcggacgcaactgagcacctatacatctcctagtttgtggcaggtgctgatctaagcctattagataaaatagctccttaaatgtttgcagcgactctatgagggagggattac

SEQ ID NO: 824 - DNA, 501 bp, Bos sp.
ctcttctgggacttccctggtggtcccctagttaagaatccaccttgcaatgcaggggacaccagttctcaactcctgcttcaggaagatttcacatgccatggggcagctaagcctgtgcacaactactgagcccaagctctagagcccatactccacaataagagtagcccccacttgccacagctagagaaggctcgtgtactgcaaccaagacccagcgcagccaaaaataagtaggtaaaaaaaawtttttttgatcttctgtagattaaatgagatgacatatagagtgcttaagaggttgcctcaacatggcactcagtaaaggttagcgttaatgatagttaataaaaagctttgcgtatgtttttccttaggaaaaactccaaagaggaaattgctgggtcaaaagtatgtgttttagggcccctgatagaaattacaaattctccaggccagaatactggagtgggtaggctttcccttctccaggggatc

SEQ ID NO: 825 - DNA, 501 bp, Bos sp.
  misc_feature (1)..(27): Nucleotide uncertain from position 1 to 27
nnnnnnnnnnnnnnnnnnnnnnnnnnnaaaaacagtgggaagtcatataatggaattatttattcgtgagataagctaccaatgatcatatgaaaactaaatatgaggtaagcagctcagggtcatacagctggttcatggaagaagtgtgctaaatgcctttcttcagcttcccaaggctgtgctttgaagagccccacaaatagttttcctaacattaaagtattttagctttcatctatttataaaasagctaataaaatgtgtcattttaaggtcaagttcagctaaatatcaaagtatcacttttaaaagaacaatgtattcatttatcatgtttaatattcatttttctatgattaaggcatatccttaatatcttttggtacatcatatcctttggtacaatatttcattattttaattctgtaatgggcttgggagtgaattgttttgttcaggttaatgtggtctaacattggcttttatcaatgcgaagga

SEQ ID NO: 826 - DNA, 501 bp, Bos sp.
aacaggactgtgagttatttcagcctgcagattgaaggacacacaccttagttagcagatgtctgccacagagactgatatactcagtaaacacagctcagctcctttacttgggtactagagatggtaaccacaaatgatggaatgcttgtgggaaggctgcttagagaatatagaggtcagtgacattcattgtgtcctcagcacccttgtttagcatgttgtatgttttatagtgtcttattactttsctttatggaataatttaatgactgctatctagagacattctggatcgttctggccagttttcgagaccttgggaatatacagttggctagagaggtgtatctgggagtcatgcagtgctgtatgcctgttcagaatgggcttggcattcacagaagcaagagttgcattgcagtggtagttttagttcaggggactggtgaataaagtgggaaaaaataggcaagtagctgggctagtatcagttaacac

SEQ ID NO: 827 - DNA, 501 bp, Bos sp.
aaaatttttaaagagaactataaagagcttattaatatgtagatactgttaattcatgctattccaagtgtaaagcatcacatatttcaattttgcactgctgtttttaaggggaagggaattacagtttccttatgacaaaaactgactaaaaatgccactatcaaaataagcccagttattaaaaatgtataatatgattaaagtaggatgataggtttaaaacatcaacctagtaaccaaaatgattwttgaataattattaatgaataaccaaaatctgctatttctagttatagaatgtcttttttcagaactaatgtcctgattcattaaaaaatgaccagagaattctaaaactatttgaggcattactgtcatgaaacacagagcagattcaacaggtggtaaaaggtaaaagctgaatgagagctttagattttaaaaactaaattaatctaataatccagaaatccacttgttctccttgtccatttattt

SEQ ID NO: 828 - DNA, 501 bp, Bos sp.
aacaaaaggaatttttttttcagtttttctggaaactttctgtggcttgtcttctaaatgctttatgcttcagcttcttcatctataaaactgagaattagtaaaatgaatgaacctttgtctcttacaaaatgtcttataggataggtactgtgcaagtaatatgctatggaatgatagcattttgttagtgtttatattgataaacataatttgaattttccattaattggaactaatcttttttatarggaaaaatctttccaattaaatcactggtgtgtgacctttgggtggctgaacccttctgctttacttctaataaaatgggttcctactctatttttgggcttccctcatagctagtcggtaaagaatctgcctgcaatgcaggagacgtgggtttgattcctgggtcggtaagatcccctggagaaggaaatggcaatccactctaatattcttgcctggaaaatcccatggacagaggagactggcagg

SEQ ID NO: 829 - DNA, 501 bp, Bos sp.
aactttcactttcaagagtagagggagtcagcaggaaaaactggaaaaaaaaaatcacctaagtcaggtatgtatttcaaaagcgataaaatagtgaattgtgctaaatgttgctaaacgtttgaggaaattgtgtgcaaagaagtgacaattggttttggcaacagattactggtgatcaaaaaaatcattgttagtaaatcagtgttaacaaaaaccagaacaaagtaagtagaagagaaaatggacaytattttttaaacaagataaaattgaatacacatattattattttgatccttcctggaaacaccactgtatgggagaaatggattttacaagccatcaacctcaaatgacaaaacaaataagccattaaatagcaatgaaatactaacaaataaacaattgataattgtgttagtatacttgattacttgataatactgaaagattagatggaaaatctttagattcttttttaaaatctaatacttttta

SEQ ID NO: 830 - DNA, 501 bp, Bos sp.
gtacaaacttagataattataaaatagccaactgacacaggtatctaaatttcagtatcagcatttcttagatgctttacttttttttccatttatttatttattttttactttacaatattgtattggttttgccatacatcaacatgaatccgccacgggtgtacacgtgttccccatcctgaacccccctcccaccgccctccccatgctttacattttaaccttaatatgactgagtggtaaacttraaaagttcaaattataaaagtttataatgcttcttaaatatctattaaggcagaattttaactgagaataaaaaaccttgtaattacactcttagattgatttattaagaactgactgaacattagctaatctgaaaaccacatataatgtgtattttttcatatccaatgtaaacttctggaaacagcttgaagctacacagtatttaattttactatgataaacagcttcaattgtgctaagaaaaaa

SEQ ID NO: 831 - DNA, 501 bp, Bos sp.
taaaaatgaaaatgctttccaacatttctgtggcagattctgactgtgtctttttctaagccttctgtaatggagcagattttaaattcttttgtgtcatcaaatcccagctgcctgaaaccacctgccttttagaagaagagagcttaggtgaataagaggctacctgaaaggaatgttttgttatgaaaattccaataattttaccaaagctatcaacccaattatatcatatagaacatatgaaaaawtttttaaagagaactataaagagcttattaatatgtagatactgttaattcatgctattccaagtgtaaagcatcacatatttcaattttgcactgctgtttttaaggggaagggaattacagtttccttatgacaaaaactgactaaaaatgccactatcaaaataagcccagttattaaaaatgtataatatgattaaagtaggatgataggtttaaaacatcaacctagtaaccaaaatgattattg

SEQ ID NO: 832 - DNA, 501 bp, Bos sp.
agcaggtggttttctacctcctcaaaactagcctctaaatgagctgaaagtatacaaggtcaaaagaagaaatgaacgtcaaaaagcagaatccttgatcatggagaaaagaaaaagtgtctagaagttaaaagtttgaactgttgagattattttgcatttatttaaaaattttattaaactttcttgaagcaaaatgtaccaacattaaaatatatttcaaattatcttgagtatatttttatatctcraacatttttaaaacacaacttcacaaaatactttacacttcattaaccagtatagggaaacagagtgtcttgattaatctgatgttgatatcctaatgatcacatataccacacatgaataatcaatttccaaataataagagtatatcaaaatataattaacacaaattataccaaacataatttaatatttgagatttcaagttactttagcattgttttgccttgaacatgatatacataaacctcc

SEQ ID NO: 833 - DNA, 501 bp, Bos sp.; identical to SEQ ID NO: 77

SEQ ID NO: 834 - DNA, 501 bp, Bos sp.
attacctgatcagattcatggatgcttaagacctagaagtatgttgctatttgggtttagaatacagggttacatttcactataatttggttgtattttcttggttcattaagataataggagtattatgctgtaagtgaaaaaatgatgaggtgatttaagaagaatgaaaagttaatatgcttattttcctaagattatggcaacacatagttgtatgaagttactgtattcaaatgacttattttttwatataagaatacaagttttttagatctgttatgcttagtattaagcttaccttataaactggaattttaattcacattgtttttatttactgtatattttatctttctgaagaacatgtatttctaaacttattttcgtattttaaaaaagtattcctagaagtttgacttattttaaatatatttaattcttttgcataatcctactatttaacactgaaaattaacatttgccctcttcccatagaca

SEQ ID NO: 835 - DNA, 501 bp, Bos sp.
tcccaccacttcctttgtttgccatgcctacatcaaatgtctgatcattgttctcattgtatacacacacacacacacaccctacccatttattttcctagaatcttctagaggaatcaaatccataatgataatgatgatattgacagtgattgcaggggcctcttgaggactctgatcaagagggaatcattgcaaggctgctgcagaaacaggcttaattgctgtagtgtttaatgcaatcaattaarttcatcattttttaaaatgttatatcattgtatttaagattttaatatgaattttctttaaccaccaagtttttgagtgagtgagtgaagtcgctcagtttccgactcttcgcgaccccatggactgtagcctatcaggctcctccgtccatgggattctccatgcaagagtactggagtaggttgccatttccttctccaggggatcttcccaacctagggatcaaacccaggtctcccatgttgcagt

SEQ ID NO: 836 - DNA, 501 bp, Bos sp.
accatagagctagaaggaaccttgggaactacctagtacagacacactgttgcacagatgaggaaatgaaggtccagaggggaaacatgccttagccaaggctgcatggctcattggcttactgtacctcactaagttgcatttgctgagcctttcttttttaaaaccataattaacatattcattttcttcaccttggaagtattactttctaaaatgttagtttttttttacctattatatgataatgrttttattaacatgatttttacacacgcatacagttatgtgacaagcattcttcaaaatgctttacaaatgttttacaagaacaaatgctttgcaagtatttataagtctttgatgcttgtgccaatactgtaaagtagttactatcatcatcattatgtaaaggatgtgatgagatggcccacagagattttgtgacttagcccacagtcacacagttagtaaatcatagaccaaggcttaaaacccagg

SEQ ID NO: 837 - DNA, 501 bp, Bos sp.
caaaattgatcttggatataaaaaatcagaataggtataaaataaaaccagatatgggtttttgaaaaatattttatgcttcagcactgaattcaaatttttaatgtgttgttggaaagaaaattttaaacatgtacatcataccaacacattcttagtttcctgaagatatgaggatctttaatggaagaataaaagagatgctgtgagaaaacagttattttaaaaatatgctttatattatttctctraatgtatatggtttaaaaacttaagagtagacaaaaatgaaaccatattttctatatcagtaaaattttgtgattaaatttctttataattttttatacaagaaattgactacataatctaatatgcataactttcttgcaaaatatttgatggaaaggctattttactgttttaagacacaataacagctttacctctaagaggatgtttttagtattttcagatagcggtggactgtcgggtaattat

SEQ ID NO: 838 - DNA, 501 bp, Bos sp.
tttcgaaaagtgtttttgagtattaagtaaacattccttttctattaattagattgtactgctacatttttaagttccttatgcattcaggtacctatttgaattatcagtgagccaactcataattttagtttaattttttctaaacattgctgtactgtttcagagttcttccatcttcatattgaataattattttttctcttgttactctattagaacagttttttattaagattattttagtttcrttgtttatttttactaataacagtgcctgattcagtcctcataaaagttgcaatgtgacctcaacatagtggattttttttgtgtgtggagtatttgttaaattttttttacaatattaaaaagcaaagataataggtagtaaaatgatttttgtatatttttcttagcttcttgccagtgtccatcagtaaaacatggtatcccttgtgccacttaccctaaaggtttctaagcctctattccttctgg

SEQ ID NO: 839 - DNA, 501 bp, Bos sp.
gtctaatcatgaatcaacatcagaaaaacccaaattaaacatgctacaaaatccctaaccattattcttcaaaagtatcaagtccagaaaagactgaaagactgtcacaaactccaggagactaaggagataaataaatgcaatgtggtatcctgctttagaacaaagaaaaaacatcagtggggagaaaacaggggaattcaaatgaagtctgttgtatgccaatgtgattttcttaattttgataaagrtactatgtttaagatgttatttaacattagagaaagctaggtgaaggatattattgcaactcttctgaaaaatctaaatagtattagaaaattaaaatatcaaaaattaataattgggccttaagtgaagatggcaggcttccctgtagctcaaatggtaaagaatctgcctgcaatgcaggagacctgggttcaattcctgggttgagaagatcccctggaaaagggaatagcaactcactccagtatt

SEQ ID NO: 840 - DNA, 501 bp, Bos sp.
ttttggaaatgtaaatgttgagtaaaactgcctatctagtcatggtattttagaaaaaaatgcataacattattttttcacaaattaagaaaaagtaaaatagaataaaacaattgaaattaaaagtctgttaatcagggagggaggcttgcaggggagggcgcatattaatatgtgtacctatggctgattcatattgatgtatggcagaccactaaaatattataaattaattatcctccaatcctaartaaaataaattttaaaaaatctattaagtgaaaaagttattagttttaaaggatttctttaaatttatttggaaaattgtttggcattattgtattggttaatttttgtactaaataggtgttcccttaaagaaactccaattatccagttataaatgggaatgtctttctcatgtgaattcataactctctcacctaatttataatttcccatatttataacttttgttttaaaattgtccacttttat

SEQ ID NO: 841 - DNA, 501 bp, Bos sp.
tctgacccctgatctgggaagatcccacatgccacagaacagctaagcccatgtgccacagctactgagcctgtgttctacagcctgagagtcgcaactactaaagcctgtgtgcctagaacctgtgctccgcaacaagaaaagccactgcaatgagaagcttgaacaccacaacagcttgtggaaactagagaaaagcccaagcagcaacaaagacacagcacagccaaaaataaaatacataaaaaaawtttttttaattaaaaaataaaagttttagacaagtcttcatgaacagtgcacgctgcctatcagagtgaggtttccaggccagctctgagttcaatacggggcccaaaatgcccaggttctataaatataccaatcactttattctctcagctcagtggtctttgtcttcatttacagtgcaatctacaatggagggcttcctaagtggctcagtggtaaagaatcctcctgccaagcaggaaatgcagg

SEQ ID NO: 842 - DNA, 501 bp, Bos sp.
  misc_feature (493)..(501): Nucleotide uncertain from position 493 to 501
ctgagacactgtatctccttcttttacatacctaaaagaaaaagccataagacacttttacatgaaccatagtacagatcatctgaaacaataaaaatgctacactgaattagatgagtatccatggagcccagtattgagtcccaaatgatacactgaaggatgtttcagaagagactacaatggctttcagaggttctttgatgcttctttaagaagtataaatttttaaaaaacaatgaaatatttgwaatttataatccaaaaatttaattaatgtatcaggtttttctgcctcacccatttcttagatgaaatatgaaaaatgtattttaaaagtgttattttcttttattgtctcagccttcatcacattttaagggatacctattatttctagaattaaattttaaaaactgatgtccctcatatacatttactatacttttataaattgtagtttgagttctttgtctttatctctaacatggcnnnnnnnnn

SEQ ID NO: 843 - DNA, 501 bp, Bos sp.
gtgggtgtgaaagtctccactgtgtaaaccttcttatactttcaaatttttgaactgtgttcacatactagttattgagaaaaaattaaaaagaggactattggattcttataggaatggcagaaactgcggattttccgtccaaacatctattctgattgttttgattttaaatcagaacattgtcctctagggttaaaaaaatgttttcctagcttcccttgcagctaggtgtggttctgtgactagtragatatcttagagttgctgtgtacatgttagtatttttacatggatctctttatccatgagggagggtctttctcccttgcctttttcttcctaaatataggtttggtgtccagagcctcaacagacatcttgggcagtgagatgaccttgaaatcagaaaccatacgctaagccagcagagcagaaagatagaatcatgaacccctgtgggtgctgtggggccaacagcatatgagccgcttcctgtct

SEQ ID NO: 844 - DNA, 501 bp, Bos sp.
  misc_feature (1)..(48): Nucleotides uncertain in positions 1 to 48
nnnnnnnnnnnnnnnnnnnnnnnnnnnnnnnnnnnnnnnnnnnnnnnntcttgtagagtttcccgtggtctagattttgcttgctgcatccccgcggggttgattgacatgttcttagtctagattttgctggctgcatccccgtggcgttgattgacgtgttcttatacagaggttcatttagattcacagtatttagtttttggcaagaagaaggtagtgtccataggcacttccttttgcgtcaccargacacacatcatcatgcctgtttgtgtcttttgtgactttgggttaatcagtagattcagatattgtcagccatagtggaaaaggtttttaaaaaattggtaaaagaagttgacgagaactattatatggtaaataatataggctctgtgtgtgtgtgtgactgtgttttttaattttgttttggtaacttttacccctcttcattttgcctccttccataggatgacaataacctgttaaaacagcaac

SEQ ID NO: 845 - DNA, 501 bp, Bos sp.
tatagaggctctggttgacaattcgagctgaacatagcttttaagtcatgatatcctaggcactagaaatgtgattctaatgcttctaaatgattctggacatcttcagtgcccgcagctattcaactttcctgctgaagatccaagacattggaaaacagaaacgtcactccaacattgccctgacagaatttctgacccaaagaatatgtgatttttattgttttacatctccagactttggattaatsaatatatcaaatatattgaacaacactacatgatcttgcttaatatttttaaagacctaaatttattttttgaaaattgcctgggtgctatcagtggtatattatatttttccaatgctataaatagtatgtatttataaaatataaatctgtatcccagagcttagtcctgggtcaaactaaaatgcaaaaaaataaaaaattgagtaagaaaataagaagaactgaaatttgaacattagaaagatca

SEQ ID NO: 846 - DNA, 501 bp, Bos sp.
ttctaagaagttaggactgcaaaaacaataataaattagttgacctcattgaaacagcctaaatcatctcagcttcaaaataatcactgcatcaccccctttgcccctcccctgtccctcttcccccttcctcctttgttttagctagtaatcattagtttgttctctagatctgtgagtctgcttcttttttgttatattcactagtttattgtatattttagattttacacataagtgatgtcacatamtctttgtctttctctgacttacttcacttagcataacaccctccaagtccatccatgttgctgcaaatggatatatttcatttattattatggctgagcagtatttcattttatgaaatacatgtatgtatacacacacacaacatctgctttatctgttcatctgttgataggcacagttgcttctatatcttggcaatttattgtaaataatgctgttatgaacactggggtgctggtgtctttacaa

SEQ ID NO: 847 - DNA, 501 bp, Bos sp.; identical to SEQ ID NO: 48

SEQ ID NO: 848 - DNA, 501 bp, Bos sp.
acatgtagcctgcaggatattagttccccaagtaggtatggaacccacaccctttgcagtgtaagtgaggagtcttaaccactagaccaccaggtaagtcccctatcctttttttttttttttaacagttgatttgtttctaaggaagaaaaaataattttattgtcatattgattatttcccaggcttttatagcatgcaatgcccttctatgaataacttgaactattttacattcaagttgccactgraaaaaaaattaaattttaattgaaaaacaactacatatggaacctttgggatctctcaagtatatgatgcttaaactagttttgttattggtttttcatatttaaggtttccttaaagcaatctgaaagaatgagaaccaaaagaaaatactttatttaccattattaaaatctctcaacgtgcctactcaattcttaagtgggtattgtgtaatccccaaactcagttgaatgataggtggatatggac

SEQ ID NO: 849 - DNA, 501 bp, Bos sp.
gtgatgctatctaaatgacttggctaaactggttcaggtctccttttttcttttttttttcagagactttggcatagaataaaacagatactgaggaaaacagagctgtgaaataaagagagacacagtgtcctgatgatatcatgtaaaaccctcgatccaactctcctgaagccagattcagacctcacattcctaattatatgtgtcaacgattttatttctgtgattaatttattttgagattggtrtctgtcatttccaacaaaaatacccttcttttaaaaattttaaacattttcctctcttccattttttatttccttttttattttccttccctttccttttcatcttttttttttttttcttttgcccttagtttaaaggtgtttagtaagaaactaaatacaatcagatcacacaaggacttgaaaattaggataacagtgctggactttgtcatttataccctaaggttttttaattttggaaatagca

SEQ ID NO: 850 - DNA, 501 bp, Bos sp.
aaaccaatagaactacaccttatagaccaactcagacttatctaacagctaaaaactaacatttttgtaagtgcttacaatgacaggttatgtcccaggctttgtctgatttaacactcataacaaatgtgaaggttttattatcttcagattattgttaagaaactaagctttaaagaagacttgcctaaaatattacaatatataaaggggtaaagtcaagattcaaacacagatctgcctgactctgrcaccagcattctgaatgactacactacactcagtaactttaaactattaacaaaaaaaaagtcatcacgagaacagctttgctctactcatcaccctcacttccagccagtctgtgagacacagccatcagaaacaataccctacaagcacaccaagatcctccatcctctcaaagatgcaccaccctctcaaagatcctccaccctctcaaagatgaaccactgaaggcagatgtgcacggaaataatc

SEQ ID NO: 851 - DNA, 501 bp, Bos sp.
ccatctctataggaagcgtctcaagggcttccctgcctaagcaaaggaagatctttttgtgcatcgaggtccaggccttgttggctgcctgctgaacagctgcccccgtgctcacctctgtgggctgctattaaactccaaatcctggaggcctgttggttctgagatgatgggggagccccaagattccaactccccaggaacatttctagaaagtgttaaagaaaaacaaaactgggtaataggaagtrgtggtaaagacagattttattcagtactcctgcagcaggagaaagagacttctttagcctagaaatgagcttggttctgatctatacagaggggacctggccttcttaaagagagaaccagggaacagggaaggagagtgggtgaggactcaagcagagtcaagacagtaaaaaattacaaaagcagatgagtagtcaaccccaaatgttcattagaaggactgatgctgaagctccagtactttggcca

SEQ ID NO: 852 - DNA, 501 bp, Bos sp.
gagatcagagagactccttttaactggacagctttattctctcttggtccttgcattcccttcaacttcactgggtttaaaaaaatatattttgaacatttgattgtagcgtcctggcatctcctacgctcccatctttgcctggtgtgtgtttttcaaaatgtcatctgaaagagtgtagaattctctccatttcttctagaagaggtgatagggtttgtgggtaccagcatggtaaataggaaggttcytatggatgccctaggatttaaaaactggtcactgggcactgttactgaagtaatcggagaaactgtttccccatgtacagaagcctcccctggcatttgccttccagattaactggatgtagatcctccagtgctggagaagacggtttcttgttttccagttctaatttctttaaactgcatccatttgattgtttctttcattcgtgttttgatgtgagtatactaggtatttgccatatggttaagt

SEQ ID NO: 853 - DNA, 501 bp, Bos sp.
attctccaaaagaagaaaaattcataaaatttatgttaataagaaataaacagaatttataaaaacagaatgttataaagtaagaaatttattatagatactttaaaaggtaactatgaatactctttaatgtaattagccttaaaagagaaatacaaaccagaagttacctttggatgattaggggtagaaaggcaattaagattggatcaacaattattcactcagatcacaactatttattgtagtgytagaaagcggaaaataaaatagagtttcacggtaaatgaaagttaaaagatctagtattatgtactaactgacatccccaagctttttaaccacaattttttttttttaatttacaaccaccatatgagcctctcctagtactttgctacaaagtcgttcagtcatgcccagctctttgtgactgtatgcactctagcccaccaggctcctctgtccatcggattctctaggcaagaatactggagtgat

SEQ ID NO: 854 - DNA, 501 bp, Bos sp.
tttgacattttcttaaataatcattttgaagaaacatcagaatataagatttttaaaccaatagaactacaccttatagaccaactcagacttatctaacagctaaaaactaacatttttgtaagtgcttacaatgacaggttatgtcccaggctttgtctgatttaacactcataacaaatgtgaaggttttattatcttcagattattgttaagaaactaagctttaaagaagacttgcctaaaatatyacaatatataaaggggtaaagtcaagattcaaacacagatctgcctgactctgacaccagcattctgaatgactacactacactcagtaactttaaactattaacaaaaaaaaagtcatcacgagaacagctttgctctactcatcaccctcacttccagccagtctgtgagacacagccatcagaaacaataccctacaagcacaccaagatcctccatcctctcaaagatgcaccaccctctcaaaga

SEQ ID NO: 855 - DNA, 501 bp, Bos sp.
tttatgtttgaccagaagagaatctcactgcacagaattatttcaagggtacatgccacttgcacgttttaaaagaaagctttattataaaagccaataaatgtatttatagttgaatgcttgagacttgcttgggatgcagacaggctatcttccagagaaagacaaatgcttaaagtgcagaattatcacactaattttaaaaaactatgaattaaaaccactaaatataactttcctaagttcatttmtttttgtgtcttctttttgtcattaatatttaactttcagtggatcaagaaaattgtcactaccatttgttatctggattcaatggacctgaaaaataattttgtcctttaataaataattcacagaggcaaaaataaaaagatagtaaaaaaacaactatattctaaattttaaaacaaatttaaacattacaaattttttgtaacaagtaaattttggcatacaaacatcataaaaatgaataaagat

SEQ ID NO: 856 - DNA, 101 bp, Bos sp.
cctctaggagtatttaaatccctttccctataaatcaagtatgctttcttrgtggtaaaagaatgaaaattagcaacttctagcattcagactatataatc

SEQ ID NO: 857 - DNA, 501 bp, Bos sp.
acaactaagtggcgtaaatcctttgatgcttttgaaagaacccctgaaaaagcattaagaatgtcattatcaatgttcattcaattaacaggtatgactgtgggataagatgctgtctgtgatttagtctctaagtcttaagcctaggttttgggatgattttgctgtgcaactttccaccatatgtgtttttaaatgaagtcaacccctccacagatgttctgttgatgcctgctgtgtgcttggcacartactgagttccttaactgattgactgattgattgactgcctttgctcagtcgtgtctgactctttgcgaccccatggactgtagcctaccaggctcctgtgtccatgggattttccaggcaatagtactggagtggattgccatttccttctccttaactgattagaggagactaatacaattatttcttgatgctgtgtgatacatatttctgagacatagtgggaagattttaaaatcagagttgttt

SEQ ID NO: 858 - DNA, 501 bp, Bos sp.
ttattctctcttggtccttgcattcccttcaacttcactgggtttaaaaaaatatattttgaacatttgattgtagcgtcctggcatctcctacgctcccatctttgcctggtgtgtgtttttcaaaatgtcatctgaaagagtgtagaattctctccatttcttctagaagaggtgatagggtttgtgggtaccagcatggtaaataggaaggttcctatggatgccctaggatttaaaaactggtcacygggcactgttactgaagtaatcggagaaactgtttccccatgtacagaagcctcccctggcatttgccttccagattaactggatgtagatcctccagtgctggagaagacggtttcttgttttccagttctaatttctttaaactgcatccatttgattgtttctttcattcgtgttttgatgtgagtatactaggtatttgccatatggttaagtattgctaaggactgaagtcactaagacacctaa

SEQ ID NO: 859 - DNA, 501 bp, Bos sp.
cctgttaatatgtattttaaccctatatatataattccctatattacaattatattatgtattgtataatatttatatcatatattgcatattatatatcatatttatcacattatatattatatgtaaaacctcattattataatatattaatatgatggtggtggtattattatgatgttaatatggctaatattatattaatattataaccataataatgatggtaataatttactataatgattatygttgctggcacagacaacaaagtagacttcccaaagacccttgacttgtaggcaggaagaacaggagggctttactccactactcctggagcagcctcctgagtgtagactccaggcctagggggcagctacacaccttcactccctatcctagccacttgggagcagctacagtcacaagcctccaccccgagcaccccacctttctcccctggaccagctaacaccgtggatctggtccctctcaggt

SEQ ID NO: 860 - DNA, 501 bp, Bos sp.; identical to SEQ ID NO: 538

SEQ ID NO: 861 - DNA, 501 bp, Bos sp.
tccctccacccagaactggctcagatacttctagtagcagtcatgttaggaggatctgagacatttcgtagaacagggtgttcaaagaagacagcttttactgtgtattcctttgagtagcagtcaccagcaagggctttagaatctcttgccttggctcagatacaatttataccattgatactgtatagcctggggacaattataaaaataatctcatgtgatttttgtgggttttaaatgagatactrtacatcttttagctcttgatggatactaggtgtttgtattatatttgtcagagttctctagatagatagatagatgtgtgtatgcttagtcattcagtcgtgtctgactctttgtgaccccatggactgtagcctgccaggctcctctctccatagggtttcccaggcaagaatactagattgccatttccttctccaggggattttccagatccagggatcgagccctcgtctcctgcattggccggtg

SEQ ID NO: 862 - DNA, 501 bp, Bos sp.
cattgcaaagtcacttccagtcatttgaaaagaacaacagtttacttataaactgtttccttgattcagcaaggacaccaagcatgtgaaactcttgtttcttcccatctttgacttcaaaaagatgaagaaagatgagaattaatacaatttaccataacaagagggatatttatcctttgaatcagtttagtttcactagattaaatttacaataatgcaataagcataagacttccatatctaacccmgtaattcttacttttatcacacctaatagtcttcttttagctcttcatataactatctcatgtataatcttatacctattttctaaacatattttccggtaatctagacttcactaaggttcttgtctaaataaatatattctctatttattgcatgccatggctagtggaggtgatgaaattccagctgaactatttcaaatcttcaaagatgatgctgtgaaagtactgcactcaataaaccagcaaa

SEQ ID NO: 863 - DNA, 501 bp, Bos sp.; identical to SEQ ID NO: 246

SEQ ID NO: 864 - DNA, 501 bp, Bos sp.
taggaggaaaagggtatgggcacagcctttccccacctctgccttaaataaaactacttggctgattctgtgatttctttgtttgtacatttacgggagggagaagctataatcctagtcagcccacttcagatagattggagcaggggaaggaactcggctataatcagtttccctagctccagatcctatggataggaccctgaaatctcagtccttagtcactcactaatgctcccacaggatcacarggaagagagacggtctctagcagagcgagcaaccatgatcgagcattacagttatgatgtggctttagttgctttcctgcttagctcaagaatttgtcaaagggcctggaagccctggtgaaaatgaaagtgtaggttgcttagtcgtgtctgactctttgcgaccccatggactgtcaggctcctctgtccatgggattctccaggcaagaatactgggttgccattcccttccccaggggatcttccc

SEQ ID NO: 865 - DNA, 501 bp, Bos sp.
ctacttatctttctgacacttccttgtgagttgattttggtggacagctcaaagtgttgagtcgtttaaggttttcttttattaattaattaatttttgtctgtgctcgtcttcactgcagtgctcaggcttcttgctgcggtgggttctcttttgtggagcacagactctagggtgtgtgggcttcagtagctgcagcacgtgggtttagttgccctgcggcatgtggaatcttgcaggaccaaggatcraacctgtgtcccctccattcgcaggcgaattcttaaccatggaactgccagggaagtccaagtattgagttattgagagtgcagaataggaaggataggtcccaaggcaaggagccttaggagagtaagtgcttcctattacggatgggtcctgctttgatttccaggcttgggggagccccaactgacatcatagatattaacagttctctcccaaattttctttagctgctttgttccacccctgcca

SEQ ID NO: 866 - DNA, 501 bp, Bos sp.
gaggagaagggggcagcaacggatgagatgactggatggcatcaccgactcaatgggcatgagtttgagcagactcagggataaagtaaaggacagggaagcctggcttgctgcagttcatggggttacaaacagtctgagatgaatgagcgagtaaacaacaagatgagtactcagtatcagtatgatcaggccatcttagcctggtgactggcccttcaccaagatacctacttacagactgagacacrggagccccatccttcctgatggttatatttcaaaggaatggctcccaggtttttgagaagacactcctgggttccaggagatacacatacatctcaaaggcatagagaaaggatttacaacaacaagtgttcaaaataaatgctctaagaaaatggaggcaaggcgtctacctgaaggtgttggctggaacaaatggtaaattcccttggcatacatgggctttctcagacagaaactcaagtggcgatg

SEQ ID NO: 867 - DNA, 501 bp, Bos sp.
  misc_feature (434)..(501): Nucleotides uncertain from position 434 to 501
aagacaaagaaccagtagcaagacagtgggacgtgtgctctgatgttggtaggaagaagtactagggacattagcaagggggcacccagcttgatctgtctttggtggggatgatcagagaatacacccacaggaagatgaaacttcttaggccggtaatagccaggagaagattaagttcattccaggcaaagagaatagcaaagtacaaagaccaagaagcaagagacaagaatgtatataattggggragggggcaaaagaatgcacacagggtctggaagggcaaatgtgtgtatggtggtgagaggtaaggatacgggaggctacagactgaagagagatgagtttacagatgtgaatggggagaaggagagtggatgaaagattcatgtattcattcaacaaatgtactgaatgactactacgtgctnnnnnnnnnnnnnnnnnnnnnnnnnnnnnnnnnnnnnnnnnnnnnnnnnnnnnnnnnnnnnnnnnnnn

SEQ ID NO: 868 - DNA, 501 bp, Bos sp.
aacatcaacaggtgcaaatcacgcatgatgatatggaatcacactgaaaaaataagcagtcttctggagaagaaaaataacgatttctataatgataaatttttcatatattttgttttgaaacagattttcactgaaacattttcataattatgtacagatttcatttcactaaaggaaagctttagccatagctatgaactggaagaaccttttaaaaataacaatttctaggctttgcttgatgtaayaggcagagttaatcaattttggagtttgacccttattttataatttaatgtttatatatattactttacaaatcacaacatgttttcttattttttaataagaataattgtatcagacagaatggattcagttatgctgtcatgggaatcataaaaattccagtagtatggtaaaacaaagcttatttcttgcttcttcaaatttcaaagtgtccaaataaatttctcttccattttccttcatgtagtg

SEQ ID NO: 869 - DNA, 501 bp, Bos sp.
cctgagattaaaaaattcctatgcttattttacagatgaacatactgagttatgcaacatccacctgctcccccacgtttcccagtcccttgcagttgggtgggacacagaggtgctggtagaatagagcccgtgcatggttctccagcttccctctccccttacgtagtgcccaaaaggtcagttccagatgaggtggtagattcagcattggccaggtgctttcagcagagtccctcacttcccccccractaacattacatgtcagataaacactaaaaataagaaataaatctttgtctgttatgctaccaagatttcagtatttgttttgtttagttttaattgcaaaacgacccgaccactttcacatatacatgagagtctgagtaacttacctaacaggacacagctggtacatagcagagtcaggattcatacccaagtccacctgtgttctttttaaatgttgtggcaaaatatgctaacatagcttccca

SEQ ID NO: 870 - DNA, 501 bp, Bos sp.
caaagtattagagtttcagcttcaacatcagtccttccaaggggtgtagtactagtaaaccaaatgagtgtagtggtagtaaaatagtcttaatgagttacgacaattcagtgaaggcacttagaagggtattaagtgcaatggaagaagtgttgctggttacccttgttaccatctttgtggctgtcatccttactgctgctccctgaccttgaagtcctactatgtgaacttctaaggttgtggaaccraaaggaacttcaggaaaccatgacctagctcaagcttgataggctgataagcctgtgggccactgcttttgagaaatcttcttgaagggcactggatcaatcaagactgtgcttctctctctggcctctcaccaaccttcgtcatggtgttttcatgggtataatgttgtagtctagaaggaagatcatcagaaccagcaccatcagactgtgggcccaaagtgggttccacctgtgctttctgccccct

SEQ ID NO: 871 - DNA, 501 bp, Bos sp.
agtaaagaatctgcctgcaatgtgagagaccggggttcgatccctgggttgggaagatcccctggtgaaggaaatggcaactcactccagtattcctgcctggagaatcccatgcatagagaagcctggtgggctacagtccgtgggatcacaaagagtcagacacgacagcaaataacactttcactttcatgtttatttaatccaggctctttttatgttgattctagaatcactgattttactccctwgctttttctcttatccctcagattctctcctttatagtctttcttaaaaaacaccacttggacttccttggtggcacagtggataaagaatccacctgccaacacaggggacacaggtttgacccctagtctgggaagattccacgagccgtggagcaaccaagcctgtgcaccacaactactgagcctgcgcgctgcaattactgaggccaaacacctggatcccgtgcttcgcaacaagagaagccac

SEQ ID NO: 872 - DNA, 501 bp, Bos sp.
agtattcttgggcttcccttgtggctcagctggtaaacaatccacctgcaatgtgggagacctgggttcaattcctgggttgggaagacttcctggagaagggaaaggctacccactccagtattctggcctggagaagtccatggacagtccatggggtcacaaagagtcggacatgactgagcaactttcacttcactttaacagatgaagagactgaggcccaaggtgttaaaccattgaagttgctrgtgttactgactgacagacaactagaacccatgtctccctaactcttaactcgctgctttccagatcacatgtgacaaaccttggaagagagcttgcaagtcccacaatccaaggcactcctgtctcccctgtagaacgcagctttctctctgcaaagcagttaggaaaagaaaagacttggtggggaaatgacattccttatgctgaaatgcttatgctgaaggtgcttttacgatatatattttttat

SEQ ID NO: 873 - DNA, 501 bp, Bos sp.
ctgtggtggagaagaggtatgtccccaagtattaaatttaattaattaatattaaatgaaccagtgattttattcctaagacaacacacagcagagatgttcagaatgtctcaggatgtgtgtagcaaaccaatcgccttcagtggttaagcagaattgtcaaaaatcatggagatgtgaagaatgggcaacaagcgtatgagacaagctcaccatcattaattattaaggaaaggcaaatcaaaaccacrgtgaggtattatcttagtcatctcagggtagcctaacaaaataccgcagactgggtggcttattaacaacaaagatttatttcacacaattctggatgctggaagtccaagattagggtgtcagcacggtcagattacagtgagggtcgttttctaggttgcagatggctgccttctcatctgattggcacacagccgaaagagctcaagctagctctctggcctcttcatatgagggcactaaccctgt

SEQ ID NO: 874 - DNA, 501 bp, Bos sp.
aaagcctttaaaaatggtccacattaaaaaaaaaaaaaagaagaagaatactaagaaaggccttactttgatactaggaaaaaattcaccttagactggatccagaaatccagttctggttccacttaagcaagcttaaattcaagattggaaaggatcaagctctttccaagcaagttaattgccacaacaaatttcaaaaacatttataggaattcaaaaatatcctgtacccaacaaggtaaaattcrcaatatctggcatccaagaaaaaatgactaggcacacaaagaagctggaaaatgcaactcatagtgaagagcaaactcaattaattgaaactgactcaggcatgacacagacggcagaattagtaggcaagggcattgaaacagttattaagaccatattctgtaagttcaagaagctagaggaaagtttaggtatagatacggtagcttaaaaaaattacccaaattgaacttctagacataaaaacta

SEQ ID NO: 875 - DNA, 501 bp, Bos sp.
gtgcgaccccatagatggcagcccacgaggcttccccgtccctgggattctccaggcaagaacactggagtgggttgccatttccttctccaatgcatgaaactgaaaagtgaaagtgaagtcgctgagtcttgtccgactcttagcgaccccatggactgcggcccactaggctcctctgtccatgggattttccaggcaagagtgctggagtggggtgccattgccttctccatgtaacagcctaaggrttatgtaattactggatttgaaatcatctatattttgggtctctgcaaaacttatacataggcaaaataaattgcatagacagaaggataaagcagatgtataaagagaatgggtttagataatacacaattatactaattgaaacttcatagcatcaacttatttggttgccttctgttttttcttaaaatttcaatctcaacttcccttctaagaagtttttgctatcctctcaaaatcagctggttt

SEQ ID NO: 876 - DNA, 501 bp, Bos sp.
cttatttctggagcttccttcaagaactcattcacatcctctgtcactgagggtcatgcacccacctgggagacagagatggctgctgtcggctccacctctggtagtgctgggccgaaccagcacgtggaaacaagggcagcaaggtggtttgggtggccctcatatgccactgactttctgtctagcctttgataattcggtgacactatgtcctatatttcacacctagaataatattgactccacamaaaaaaaagaaggctttctccctggaccactggattgggcatgttaaaaaagatgacaaatgtagcacagaatctgaaagaaactactggccaagaggaaagcatgatgagtttatttggtgtgacttctttgaggaggaaggtggtggaccaccatttcaggcttgcctgagaaccacctgagtgtagacacctgcaagcttgtcccgttaggagctgacggcctgggggtgggagtgaaccgcagtgt

SEQ ID NO: 877 - DNA, 501 bp, Bos sp.
tcagttttatttccatttcaaaaactcaagtttttaacttcttatctatgggttcaggttatttacttttctgccataatggactaaatgaattaaaagcaaagagcagtttgggagaagatatttacaatgtaacaatggtcaatatcaagaattaaataaccactaacactagttaataattggtaaataggtactaaaaaatgggaagagtatatgatttcacaaaagcctaaactcaagtagctaayagatgtaacaaatatattgaatctcactagtaatcaaagaagctcaaagtaaaaattagatattatttcattctcatcagattggggaaatttggagtctcataataccattatttgggcttcccacatggcgctaggggtaaagcacctgcctgccaatgcaggagaggtaagagacgtgggttcgatccctgggtcgggaagatcccctggggaagagcatggcaacccactccagtattcttgcctg

SEQ ID NO: 878 - DNA, 501 bp, Bos sp.
aatatttaattgttgaggagtttcatctcaacgagattttttttttaattgtgttgtgatgtcttctaaagttaaaagtaatcctttaaatgatagttaatcagtgatattcatccacatagtgctttgtaaaggattaattttcaggactttccttgaaaaggattctttttggtaaagaaactctaagcattttaagtaaaactgacttcaaaaatgtcagtgagtttcatggccattttaagatatgrtaagaaggggaaaaaatgaaactcttgcaagtgaatatgcttttcaaaataaaactaattttgcacttctacctcttgtttatctctggactccaaaaaacaaaaaaagagtttcatggccattttaagatatggaaaggggggaaaaaaatgaaactcttgcaagtgaatatgcttttcaaaataaaactaattttgcacttctacctcttatttatctctggactcccaaataaaaaaactctggact

SEQ ID NO: 879 - DNA, 501 bp, Bos sp.
ggatcaagctctttccaagcaagttaattgccacaacaaatttcaaaaacatttataggaattcaaaaatatcctgtacccaacaaggtaaaattcacaatatctggcatccaagaaaaaatgactaggcacacaaagaagctggaaaatgcaactcatagtgaagagcaaactcaattaattgaaactgactcaggcatgacacagacggcagaattagtaggcaagggcattgaaacagttattaagaycatattctgtaagttcaagaagctagaggaaagtttaggtatagatacggtagcttaaaaaaattacccaaattgaacttctagacataaaaactacaatgagataaaaaatacactgaatgggattaatggcagattagacattgcagaagaaaaaatggttagctcccctaaaaagtcctcagtgaagcctacttatctttctgacacttccttgtgagttgattttggtggacagctcaaagtgttg

SEQ ID NO: 880 - DNA, 501 bp, Bos sp.
aagtgttattctagctacttttctgtttcttctggataattccatgatatattaggataaaagaaacaaagaaaagcaactagaatcaaaaatgtgttttgatttttatctcttcatatttaatcgacaattacttcaaataaaaatctattgacacctgtttgcttgcatatgatgtagatttaaaatgtcaagattttgaaggtaaaattaatttagttcttattataatttccaattttaattctttytatgttttacttatatttgacttttcgtgtctataacaaaagttgtcaaaagaaaaattagtttgaaaaaagtattgtagttctaggtgcagaggaaaatagtggagaagggttgaaaagtggaaggctttgtaaacatttttccttaaaataatttcatgtctaagaagcagattatagcagaaattctaacctttcttccttatattccattcttacatttatctcatttcataaaatttattcacat

SEQ ID NO: 881 - DNA, 501 bp, Bos sp.; identical to SEQ ID NO: 29

SEQ ID NO: 882 - DNA, 501 bp, Bos sp.; identical to SEQ ID NO: 229

SEQ ID NO: 883 - DNA, 501 bp, Bos sp.
tcgcccactttgcagagacagatgtggatagaagttaagactgatgggcagtgatagattgcttgatcagagacacagaaagagcatccttgggaaagtgtagacaagcaaatgagggaagaggcttatggaaggaccaaagtggccagatctttccagttcaggttaatgcctagaagaaagtacccaccatggagtagaccatcagcaaccaggtcaactggtgacctgcccagaggaggctgaccatktcctcttcagccacccaatgcctgtgcactgaacacatgatggcagagatgacagccatgcacagactccacagattggactttctctccctcaggcaggtgcatcaaagttttgacaatactatatatgaaaatgccagcaataaaacagatcagtttggcaggtgggtagcaggttaatgactccacccagtaagaggcagaaatacattcctgctggaatttttacctactctgggcatgggtttgc

SEQ ID NO: 884 - DNA, 501 bp, Bos sp.
  misc_feature (83)..(132): Nucleotides uncertain from position 83 to 132
tcttctctgttgttgttagaaacaatgctatgatgaatatttttaatctacatctttttgcactggtccaattattttccggnnnnnnnnnnnnnnnnnnnnnnnnnnnnnnnnnnnnnnnnnnnnnnnnnntggtccattattttccggatgaatcctgaaaactgagtttgctcagtcgaaaagactaggaagtcggcatcaccttagcctcacgacagtgggatgtgagcatgcctgcttgcctacarcatcactggcaccaggctttcccacttcttgaaatcctcagggtgcttgtggtacccatgtctgaccacactcagagttctgggatcgtcaggcttgcgtgggtctcaggccctggcactgcctctgttggggactcccagtgttgtaagggcaggattctcatatcctctgtgctcaggggtttctcaccacttgtgtttactgcaggatccagacacatcagtcaggctgcagccaaagttgacgttg

SEQ ID NO: 885 - DNA, 501 bp, Bos sp.
ttcaaataaataaaattataaaggaaagaggagacattacaagtgataccacagaaatacaaaggatcctaagagactactatgaacaactgtgctgtattcagtcgctcagtcatgtctgactctttgtggccccatggactgcagcctaccaggcttctctgtccatggaatttcccaggcaagaatactggaatggattgccatttcctactccaggggatcttcacaacccagagatcgagaccacrtctcttgctttggcaggcagtctctttatcacagtgccacgttatagcccagcaaattggacaacctggaataaattgataaatatacaaccaatcaacactgaatcatgaagaattagaaaatctgaactgctggtaatgaataaggagattaaatcaataatttaaaacttaccaacaaagaaaagttcaggactagatagctccactggtgaattccaatcctttttaaactcttccaaataattga

SEQ ID NO: 886 - DNA, 501 bp, Bos sp.
ggagccaatcaaggcttcatttagctttgaagaaggaacctgagagaagagaattccgaaagtcttagaaaccgctccattgaaaaatgctctgcagcaggggtccccagcctccgggatctaatgcctgaagatctgtgatggagctgatgtaataagagaaacaaagggcacaggaaatgaaacgtgcctgaatgatcctgaaacccgccccacccccagcccctagtccacggagaaagggtcctccrtgaaactggtccctggggccaaaacagttggggactgctgcagagaagaagaatcatttaaaatgctgagaaccttttcactctcttttgcctatctggaaaagttacttttattacccagttatgtgaaagctttgtttgtggtgatgtttcctaaggcccacttgactttgcattcctggatgtctggctccaggtgagtgatccctgcatcatggttatctgggtcatgaagatcttttttgtataa

SEQ ID NO: 887 - DNA, 501 bp, Bos sp.
tagagcgacaccccaccatgtgtggcagatggtggccatctccacttccgggggagagggggaggttaccagttataggggaaatgacatcaggtgggctcatttgttaccaggaaaactggcggagaggcatggccctcatggtccctttgataagctctcatggtggagatttctgatgagatgttctgatattctgatcagaacaactaaaacagtccccagctggggaaagtgtgtgggctggtcartcaacgaaggtgcaccagggaagtacagggagcaagaaaagagtcatcctgggtggctgaccatacaatgagcctgttgaatatctacccaccctgcaagatccagctccagtgtcatctccttgaaaccatccaggatcccccagtaggaatgaacccctccttcctctacatcctcacagcaagatcccagcaactaacagtaagggtaaattgcagagatcatccaaaactccaaggcaacccttca

SEQ ID NO: 888 - DNA, 501 bp, Bos sp.
tttaaagtcagtaggagtgccctcaccgttgactgtttatagagtattttttctgttttgatagttttcgggaggcaacacagcttcctcgggggatgtaggattttttttcactatgtagggcattctcccaacatgcatgaactccgcaaatcttttaagtccagggtatccttccccggtaccctaaacctgctagtttattacatacaggattaaccaggaccctggcagaatcggtcaaggtcacyggggcaggtgccactaccccagaacctgacagcacgcttccaggcccatttccatcttcgctctcccacccccactctcactcccaccccccactccgggggttcgctcgggctgacggcgacttggtccggagacgcctcctccgccctagcggtggcccagcttggcaccgcgcctctggaagcttcctgagtggcaggcggtgtgggcggcccgggggaaaccggggcggagccggcggcggccggg

SEQ ID NO: 889 - DNA, 501 bp, Bos sp.
tccaatcgtgggtgctgttgcgggcaacctgcagaccagtgttctcaaagctggcagagccacctggggggcttgttgaaggagatgctggcccctcgccagtgtccctgattccacaggtctggggcgagcctgtgaatgccctaaccataggcagagccaaggagtgctgccccacaacatccccaccacatccccagtcctagccctggccccactgaggggctatgatgactggtctccctgggaaygtacagcttagctactccatccgaaagtcatggcaacattttaaaattagcaaaaagccagctgtaaatatctcatgaatcaggctatggaaggcccaggccaggaacatgagtggcccaaatgtagaacatcctgacccagcatgggattcccacccccgcctccccccgcctcccccgcacaaattagtgacctccaagtgtggttcctgggctagcaagcagcacctggacttcagaaaggtaggtt

SEQ ID NO: 890 - DNA, 501 bp, Bos sp.
acacaaatcaaatgaattatatgttggattatatttctaataaaaagaaatgtttcggaaaaacaaaagctgtgtacctttcaggatggccaagatctagtcaaggtgggctaacagttggacgaaagcgctaagccctcagtgatgtaacacaacgaggtgctgtgcctacctcttaatgcagtcctgttaaaatgaggctgctttgcttcacatagtcatttggggacccagggtcttttcctccagtrgctcactcatccctgtcttcagaagattcagtgccctaggctggttcatttcacattggtaggatttttttgttgtttgtttttaagagaccagctctagaaatagcatatatcacttctgtcaacccagttgtctgtctagccagaactgttatttgactccatgtaactgtagggtagatagctcagaaacaaggtttagctgggtgccaagagggagcaaatacagacaggtcctactataagcaat

SEQ ID NO: 891 - DNA, 501 bp, Bos sp.
tgaataacagtaggaaggaggaaattagcacatcccttttagaggcggatgggaaccaggaagtgtttgactttactccctcccctttgagtataaaaggagcctgaattctaactcagggaagatggttctttgggacatgagtccaccatcttcttggtctgctggctttccaaataaagtcattattccttgccccaaacagcctcacctcttgatttatcagcctgtcatgcagcaagcagtatgargctggacacttctaggaagctaagccatgagtcttgtaacaattggctccagattaataactgacagctttcctaatttttgttcccacttcgaacttaggaccaacaagagaaggtcacatcagcacccttcccaatggtataggatgtcccacttctccttagctttcctccagcttctccagcccacagcctccatcaggacataactgagcgtttcctttctcccctgagaaactttcccactcct

SEQ ID NO: 892 - DNA, 501 bp, Bos sp.
ctaatctccaagatatttcaaagtgtactcagcttttgatattcacttagtgtgtagcttccttccacattataccagaattggtttctgtgactgatagaatataaaaacagtgttaggtcatgtttcaggtaatattatcaatgactgaagcttcccttttgattatcttctctctctctccctttctttctctctaattctttgctctgggggaagttatgttgctgctgctcagatgctcagtcatrtctgattctttgcaaccccatggactatcacttgccaggctcctttgtccagggaattttccaggcaaggacactagagtgggttgccattccctactccaaaggagaaaggaaaatcatgcctaaatcgttactttaaaatggcagtgaaaatgatatttttcatatttttgtgtcatgttgattttccactttgtccttgcacataagtgtttccaatcaaagaaagtatatttctatctctgtatct

SEQ ID NO: 893 - DNA, 501 bp, Bos sp.
ccaaagccaggggctctaaaaaagccagaactgaggctgctcaccagctgtgctcgccccaagctgctcacagacccactgtggccatcaccctacccaggtcttcactctctcccactcatcacagggtacccaggctcctccgtggagtcaacagcagacctgaatttagaaccttgttcttccaagtgtggtccctggaccaaaggcagtgtccggagtcttgttaggaatgcagtctcaggcctcaycccaaacctactgaatcagaacccacatgttagcaagatcctcagctctgtccctggcttctcttgcttatgattcctgacacttggccctggtaatctttggaaaatatctaattcttatgatccagactttgaaccccctctcccaccctcaactccttctctccccagagttatccatacccagcatgagtcactgaccgaaccactttctacgatactcgtgctggggatacggcaatgaacaaac

SEQ ID NO: 894 - DNA, 501 bp, Bos sp.
gggtccttgatctctattatcattctcttttgtcgtaacagtgggtacactgagtccaggtctgcctgactttaaagccatcaccccacactgcttctgggcttgtaaagctcagaagttcttggaaatgaatacttgtttcactggattttccgaaattccacattttgagttccagggattccacatataagctcctccgtggatccttaacatgatttggaaaatgactgtcttgtcaagcaagtaawtctactgaggggtggggggaggggttactgccacttctttctcttaagggaataagacctaactgttgcttgttcatcatcttaactctgagtagttcaaattttacctgttgattaaaaaaaatttttttaagtgactaaatcactgttttgttgtgtttacctaaggtgttaggctgggtcctgatagcagttgttatcatcctcctcctgatttgtacatcaatcactctatgcctgtctccagtta

SEQ ID NO: 895 - DNA, 501 bp, Bos sp.
ggttcagaatattatctgtagccttcgaggaaaaacttagagtccttgactttgtttattggctaaaccatgattattttgtgttatttgacggtttttctttgtttttgcattgtttcatttctctaattaaaattagtctttgactacatttttctagacaagaggcaggtggagagtatggtggcagtggtgggaggtggggggaagtctgttctgggaaggctccacagggtcctgctcagcttcakaaacaggctaagagtgttggaagaacagaagggaagcaggaggcagtggtaacagtgggctcccagaggtgagccgaccataggtgctaagaaatctgaatgccctcaccatgcagtggaatcatgatgccaacagtgttagctacctccatgccaggcagaataccctacatgctctgtcttatcccttacgttaatgaggatgtcattatcctcattttattgacaaggatattgaggactagagagg

SEQ ID NO: 896 - DNA, 501 bp, Bos sp.
ttctgtccctgttatacagtagagacctgaggcccagagaggctaagtggccatttaggctcacagatgacagccagtgtaccaggaaggagctccatgctgcttctcacctgggccaacgtagagaaacgcatccttaccatcaaagctgaagctgatgttctcagcctgaaaggacaatgcagctgacctcttcctcagactggccagctggcactccccacccccatggccctgggttgatggagccrgagcctactgtaagtagagtcattttccaggcctgaaaagacagctgggtggcacccgatctgcccttgctagacctctgcagcctgcccatggcctgcagtcataactgtcgtgaccacctcctctgtgtaccagtggtttcagttctgacaatgatgcttccttatcagacaaccttatcaccgtcctatgaggtgcacttaactttcactgaaggacgaagcagtcagggttcctgaaagttcagtc

SEQ ID NO: 897 - DNA, 501 bp, Bos sp.
ctgtttcaggagcagagtaaattcttaagtttgcatttggaatttgtagtaaggaaaagtaagcaagtttacctttgtttagaacaataatttcatgtcttctagcttaggggattcttaaaaggcttcagagagcaaacttttcaagtacttgcaaagcttgaggagccattaaattgttaacatttactgacttcctggccttctgtgttctggatcccggggattccatgttcaacaagaaagggccstagagcgtctcctgttgtagtctggttgtcacaatcagaattcatactagatccttgttaagcaaccctcctaaggacatggaagaggcatccaggtctcctagccaacccttttagcatatttagaattattgttgagacttaaaaataactgttctctaatatatgctaggttctccaattagtgcaaacagccacagggccctaactgcctttagcacttttctgatttaggtcatggctttgctgg

SEQ ID NO: 898 - DNA, 501 bp, Bos sp.
caggtgttcaataaatatttgttgaatgaaaaagtcaagtacagttattataaatttttgtcaatcctccccacacttacaagtcacgtatttcaagtatttttacagacaggaaaagtgttggttggtttctcaatacttggagagcataatatggtggttaggagcaaggacccttgaaccagactgcatgggttagagcccagctcagacattgcccatctctagtccctgggcaagtcattgaaccrttctgcacctgaactctgcatatgtaaatagcaataataacaaaagtattgtcttacagagttattgtggagagcttaaacataaagaacttaaacagttcatggctcctagtacacgccgaacaagagttaaataaacaaaatcttggctgagaaacaccttaataagaattactaactttctcactttgatttcttactcataagacaacctcctgatagtaacccggctttctgattcatttgttta

SEQ ID NO: 899 - DNA, 501 bp, Bos sp.
tggatgttctccagagtttgctttaaccaaaggtgttccaagttactgtgtgtgtgagtgtgtgtgtgagtgtgtgtgtgagtgtgagatggatgtggtctagtgtgtgtgctccagtctcatgtacattataaactctgcttggatgataacagtatatcctcactggaaaaaaaaccagcaacccacgagtgaataagcgtgtccgcagcctggtggaagagtgactgatgctgtaactgaactcatcytcaagcacagctccgaatgcctgttaggctggaaaactgttgtgctgcgtggtaactggacataaaccaaggcggtcacatggctgattcacctgggctgctcttttgtcctcttgattaacgacctggtgtttctctacgtggtaaaagaatggattccctgagaccactgatgggaacgtaaaatggtacgaccattacggaatacggtttgacagtttcatgaaaagctgaacatccggaacacttt

SEQ ID NO: 900 - DNA, 501 bp, Bos sp.
tactgttaggctccaacaaaatagattgaacaaacggacataattttacctcaagggtcatatattcttattccaaataaacacgtttaatcacactagaaagtaatatgtaaaattttaggaaagtaaagggaacaatgagagtaattaggagaacttggaaatggagcttcctggaagaactaatgtcttggccaagtcctaaaacctaaaaaggagtaagccacgtgaagtaagaagctggggtagakcatgtggaagaaaggagggacaaaaaggtccaaggccaggaaagagcacgtctttcaagggactgaaagtttccaccgtggctggattgtgggagtgcactgggaagttgcacgtgacatcacataattatactttctgaaacctttttaaggaggatgaaccttatcttgggagcaacgaagaggtattgaaggcctttaaatttggcctgacatggatgaatttgcattttagaaacattttgttcta

SEQ ID NO: 901 - DNA, 501 bp, Bos sp.
tcccacctgtttggcagcatctgccagctgctgtgggcctgttggctgccacctctcgatgccagctcaggaacctctcccggcctcctcaggggtgtggacttatgctctcagatccacatgttccctacctccttccagggtaggcacgtgtgtgattccaggggagggaacaggcaggtggctgctaagacctgtccccagcgccctgcacatgtgcagacacacagatgggagagatgagcatgtgsgagtctgtgggtaacacatgcctgagtgctagttacatcctgctctagtccaacaatgaacagtgaaactcccgtgactgagaaatgtggatttccttgacttctgattgtgggtttactgctgaagtccaaagcttctgtctttttaagaactagttaaaggttaaggggatccatccaatagggggtcaaaaagatcatttaaaacaggttccattaaccaagatcctgtacaaatccatgcaggaaa

SEQ ID NO: 902 - DNA, 501 bp, Bos sp.
agcttgaaaagattcctgggggagacctgtatcggaagttctccaacagtggtcctcacactggattctctgcagtcgactgggagactctcgctcttccggggtgtacgatcagccccactcctcctggagcgccagagcttcctgacttggtagatctggagtgtgaggggccaggcatttgtatttttcaaatgctctcagaggactgggatggacatccagggacatagccctgaacctgacccaaygtcctcatcttagagacagggagtgtgagcgtccacgaagggggagccgatggtcacagtggatcaggatgacctgtaaactggttattacaggtgtcccctgagggcacccagagctgggggaggcagggagttcctccgtgagaccctccagcaggacacggccctgacgccttgattccaggctccagcctccaggactgtgagacagtaagtgtgtgtggcttcaagcccccagtgcgtgcagccc

SEQ ID NO: 903 - DNA, 501 bp, Bos sp.
aatatttcagtattagaatctatttactgagactttctattttttcatttgtttcaagtgtacatgcaatttctcactgaagtgtctatatcacctaaatcttggcatctgtggattatctcttctcactcatgttaggtttttcctcattcttataaggataagcaattttcatgtgaatctgggatattacattgtaagattctgcatcatatttaaatccattttatcaagtctcttctggtaccatrctggtgaacaaaggcaggtagtttcattatggatatatgtggggaagattcatgtttcttaacttcattactgctatggaagttcccaacttggcctccactgatacctccctggatgagaagggtaagaatgcctctttactacttcttgtgttatatccactgacagggtgaaggggtggcactgttattccagggcagtggtgaaagccctaaccttccactcttctgacaccatacaggagggctg

SEQ ID NO: 904 - DNA, 501 bp, Bos sp.; identical to SEQ ID NO: 533

SEQ ID NO: 905 - DNA, 501 bp, Bos sp.
tgaaaaatctcaacatgaatcagccataggtatatatgtatacctatgagattacaaagacaatctcttgatttaacttcctctgatccactaatgataacatcaccaactcaatgaacatgagtttgagcaaactctgggatatagtgaaggacagggaagcttggcgtgctgtagtccctggggttgcaaagagtcagacacaacttagctactgaacaacaacaatgacaatccactgagacctcttytctgcttctccagatcctgtccatgctttaatcctggagaagttcaggataagaaagaattagaaagaaatagtcattgagacctttgataagtggtgagccacctggcccatatgacaaagcttttatctctaaagaagggaaacacactggctgagcaccttctgtattccagacctaggggcagaaactttaatatcatcatatttaacagactttattggtttcattttacttaggtggaaactga

SEQ ID NO: 906 - DNA, 501 bp, Bos sp.
tacatcaccaatcttggagacaccaagatattaataaggaatcagaagtgaagtgaaagtcactcagttgtgtccaactccttgcaaccccatggactatacagttcatggaactctgtagaccagaatactgaagtgggtatttttcccttctccaggggatcttcccaacccagggattgaacacccaggtgtcccacattgcaggcagattctttaccagctgagccacaagggaagcccaagaacaytggagtgggttacctaatcccttctccagcagatcttcctgacccagggataaaattggagtctcctgcactacaggcagattctttaccaactgagctatcagagaagcccagtgaaagttgctcaattatgtctgactctttgtgacgccatggactgtatagtccatggaattctccaggccagaactagagtgggtagcctttcccttctccaggggatcttcccaacccagggatcgaacccagg

SEQ ID NO: 907 - DNA, 501 bp, Bos sp.
cctggagaatcccacggacagaggagcctggtgggctacagtccatggggtcgaaaagagtcggacatgactgagagcctgagcacccactggctcttctacgggaggaaaaagttttcttctacccatttagggttcctgagtgggtctgaaagttacgctgacaaagacagaccaacaggaggaaagcatacatgttgacttaatgttttacatgaaatggaaaccttcacaaggaaacgaaggtctgyggaagtgtttggatggacgtgagggttttcacactggctctgatgaggaatggacagtcctggaggaatgcggctgatcaagcagtagcaggtaagtgtcgccgacagcgcctgttggttgggatttcttttaccttttcatcttatattgtagtacagccagttagcagtgttgtgacaatttcaggtgaacaccaaagagatcagccacacatacgcatgtatccattctcccccaaactcccctccc

SEQ ID NO: 908 - DNA, 501 bp, Bos sp.
agaagtgagccaggctgaggatggcctgcccttgaggggacagaggtaggcacccccgagaccaggcagtgtgacacaggctgcaatagaggaacagcaggttgctttgggggcacagacttcaggcattgaacccacactagaggggtcagggaagacccctggaggaaggacatggaagatgctctttgaggggtgattaggatttaattggccatgtcagtttgctagggttgccttaacaaagtacyaccagctgagtggcttattcacagaatttaccgtctgcagttttggaggctggaagtgcaaaatcaaggtgtcagcagggtcggttctttctgggggctgtgaagcaggacacagtccagacccctctctgcttctggggctttgctggccgtctctggtgtcggctcatagctggaccatcccgatccatcttcacgtggtggtctcctgctttcatgcctgtctgcaagtttcctctttaaaaggaca

SEQ ID NO: 909 - DNA, 501 bp, Bos sp.
gcagctcgccaggctcctctgtccatggaattttccaggcaagaataactggagtgggttgccatgccctcttccaggagatcttcccaacccagggatcgaacccacatctcttacatctcttgcactgggaggcaggttcttaaccactagtgccgtcaccgagtgctggattatagagttggcctcagcatccatccagcatctggtgagagtggcctgtgcaacttgggcttaagctcttcctgaasacaggtttggaaaggactcacagcaccctctccagctgtatggccacccgctatcaacacaccccactggcctcatgcagcattctccattgctggccatgttcatttcctgtggctgttgtaacaaattaccagacacttggtagtcatacttcctctgggggagaaacttcctggcctctcccagctgcctccatctccacatagccttctacaccctgtgggtccctgtatttccttttctgtctct

SEQ ID NO: 910 - DNA, 501 bp, Bos sp.
ttcataggaagacagactttctgcttagcaatacaaatgggttgttagtttttaaatttggaaattatctactctaaatacagccaattttcttctaaagaagcaatgctatgaactaagccatttttattaagttcaattaaaacactatttcttgagtgtctactctgtgccagtgtcataagggtttaggatggagaaaaagagatgcatacacttgccctttgaagtacatttgtcagcaaggcaaytgcaacttcataaggcaatggcatggatgttctagaatgatatacagatagaaaggcaacttctagagtgactcagagcctttgctttataaaatgtttctaattatattttctcagttcttcaatttcgcaaatactgccccatcaatcttccactctcaccaacaaagacatttctccaggtcagtctgaccatgtactagaaatagatgtaggaaatagagtctaatctgccaggaatagtttagaa

SEQ ID NO: 911 - DNA, 501 bp, Bos sp.
gttcctgcactgagtaaagattgtcagctcatgagctgttccttgcagtgcttttcctggataaaactggtagttggggaagtatgccacatttgtccttggtacctctgtttgcatccagcatcttacctcccttcttgttccccctccacagtcacttccaacttaaaatgaatttattgtttttaaaatatttatttattcctttggttgcgtcaggtcttagttgcaggcaggtgggattttcaccrtgtcatctttctgtttggcttatggactcactctctagatgtggcccgcaggctccagagcactcaggcacagtggttgctgcgcacgggctcagttgctctgaggcttgtgggatcttagttcccttaccagggatcaaacccacgtcccctggatttcaagacagtttcttaatgtaggccacaagggaattcccttaaagtgtatttaaggtcctggagtactttattcagggtattagaagtgtga

SEQ ID NO: 912 - DNA, 501 bp, Bos sp.
gtgtttgactctttgcaatcccatgaactatagcccaccaggcttctctgtccatggaattctccagttaagaattctggagggggttaccatttccttttccaaggggtcttcccaacccagggatcaaatccaggtttcctgcattgcaagcagattctttactttctgaggcatcagggaagccctgggtttccacatgtagttgcatccctctgaaagtcacttccaccagcttaatgctaacaaaytcagctccatgttccctgtcaagtacatcacaggcagtaacatcaaaatatccagtactgattctcccatttactttaaccattgtatagttaaagaaaactaaaactgagaaagggaatctcaggctttctgactataaaaaccaagcttaaaaccttgccttagaaaaaatgtctgtatatcaacatacacttattaagtagataactatgtcttaggaaacaaatttaggaaaattagaagacatgg

SEQ ID NO: 913 - DNA, 501 bp, Bos sp.
tcccctggagaagggaaaggctacccactccagtattctgtcctggagaattccatggactctatagtccatgaggtcgtgaacagtcagactcaactaaatgattttcactttcaatctgtggtcccatttcatcacaacttaagagttcttttattgataatgattgggttgtttccagttaggtgcattttgaaaaatgcaggtattaatatcctatgagtatgagtatatgtcctggtgcacatgtrcaagatgactctaatgcagggtgtttcaaagtgaagtgttttcatcagcaatatcattatctgggaattcattagaaatgcaatttccctggtcacatcccagaccctacttagttggaaactctggaagagaggcctggcaatgggatttaactagtcttatgacacacactgaagattgagaaccatcttgagtaactaccctgatatggacatgggtgatgtgtaccttctacttgaggaagtccaa

SEQ ID NO: 914 - DNA, 501 bp, Bos sp.
aggagaactcttgtgtcagtggcagcaatttacataatgattcaaattcttttcacaacgtacctattttgtgagtttgttcagaatatacagcatttgatttaccaattgaacacattttaatttttacattctttctacttattcagtgttgctattcagttgctaagtcatgtccaaccctttgcagtcctatgaactgcagcacgccagacttccttgtccttcactatctcctggaggttgctcaractcatgtttgatgagtttggtgatgccttctaaccatctcatcctctgtcactcccttctccttttgccttcaacctataccagcatcagggtcttttccaatgagtcagctcttcacacagagaaggcaatggcaacccactccagtactcttgcctgggaaatcccgtggacggaggagcctggtaggctacacacagtccaagtggtcgcaaagagtcggacatgactgagcgactgacttcactc

SEQ ID NO: 915 - DNA, 501 bp, Bos sp.
cacagacaacactttttcaaattcagagtgaatgtctgtttccatagcacaggtaatttattccagttacttaagattggactctaaatccatgtgccattggtaatttaggatggatataaggaagaatttcctgagagccttatgggttattaaacactgaaatgggctacagaagaaaattgaaagaccctcttccttcaaaggtccttaaaaatggaatcaatgaacattatccactgtgggctaargtggacccatatgaaggcaaggatatggaatagataacttctcaaggtcctttactgggctgacattctatgattcatgctttaaaatcaatgatctgtgttgagaaaaattatatcttatcggtatgggaagaaagcaaacataaaatattctagaggcagtgataagcatttatcgtgaactaaaccaacactgcggacttagaagatatttaccaagtttgactgattgcgaatgtggcagtgatac

SEQ ID NO: 916 - DNA, 501 bp, Bos sp.; identical to SEQ ID NO: 562

SEQ ID NO: 917 - DNA, 501 bp, Bos sp.
tcaagatccatgataaagctaagctcatgtttggatctgaattagaagaaactcttggaacctcagtggcagattttgtggctcttcatgtaaggatttctcccttttcttgattaatttatcacatatccacctgggccagaaagccaggggtataatttgttacaaaaagttgcctgccaatactgtatcagttgatagaaagtaatttataaaataaatcttcaaaggtgccagaggttattccctaygtctgggaatttggaggtagcattagagaaaaactgtatttaaattaagaaggacagtataaggggtgtggtctttctttagaaagatatggaaaggtaacagacaaagagcaattatcaaagattaaagtggtggatttatgatagtgaaaacagactcccatattctgaaacaaaattccaatacaaagatcatggtagtgccacattcacagttgttggttagctctgtgtgtgtatgtgtgtgtat

SEQ ID NO: 918 - DNA, 501 bp, Bos sp.; identical to SEQ ID NO: 563

SEQ ID NO: 919 - DNA, 501 bp, Bos sp.
gtgcctcaacgagatcggacggtacacctgcctctgcccacgcgggttctctggtaagtgggggtccagtccggggcggggaacctagccctctgcttaatgtgatggaagcagaagagaccttgaatggcccatccaactgcttctgaacatggccttgacaggagctcatcagcagatagggggcctcctaaactactcaaaatccacccagcttgagcgtttgtcgctgttgttattgtagatgcagkctagacttaaagggcgtctgggacctgggcttcggggtcaaggcagtccagtctccccatcagagcagacgcccttcctcccaggggcgtggggcggcctggtgggggctggccacggatggacacagggtgtcggagtgtgataaacacaccaaggacagcaaggctgacggagaatggcctttgagataagtcatgattttattattttaaaaagccacttcttgctgaatctcatggaaacagcaaa

SEQ ID NO: 920 - DNA, 501 bp, Bos sp.
tctcggatacaagagaccagcaagcaatgaagccagaagcatttagacatttaactacatataatgtaactgcgaagttatatgcaatcttaagtaaaagatttttactaatgtttaagaatagtaacaatcagaaaatacaatttcagatgatttcagcaatacttaggagtcatggagaagaaaagcaaagagaagtatggtcagctgacgtgggttgtaggacatgaggacacgctcttgtaggtctratgtcattctcgatagtgaaacatgtttgtgaaaaagatttgggtaaaattaccaaagaagcctggcatgctacagcccatggggtcacaaagagtcggtcatgactgagtgactaatacaacaacatataacttccaaggaaattttacagaagaatgagaggttgcaaagtgaaagcgttagtcactcaggcatgtccaactctttgcagcccggtggactgtagccttccaggctcttctgtccatg

SEQ ID NO: 921 - DNA, 501 bp, Bos sp.
atgacaggttagctatatttctgctcagcaatgtaatattgaggtgactgcaaacaagtcacgctgctgaagtaaggagtattggctgagctgttactcttcaagttattttgtgacattggaattccatcaaatagagttaaatgtacctttaacttttaaacaagccccagttctgagccttaacctggatgatgacctacagattctcaacctgagttagaggtggatgaaaaggaagcagttttctrgggcgtgttttcatgtcaatagattcatttactcaaatgtgtgataaacaccaactgctcacactttatgagagatacataaaaacgtggggacagaggaaccaattttgcaggaatttacagtctaagtaagcaaagagagtttaaactaagactcagtattttaattttaatacacacatacacatcagaccctagtaaaagtttctgcacagaagtgtgaaatctccaagtaatgttttccctacca

SEQ ID NO: 922 - DNA, 501 bp, Bos sp.
aggtagacgtgcgtagtttcatcggttttgaatatagtttccattgatttaataatagtttgcatattccttagcataaaaaatagaagataacttcaatctctttaaaatgttaaaaaaaaaaaaaccctcttggcttaaaagggtttacttggttcgcttacttactctctgaggtcggcagacatgaggaagctctgagaagaatggggatctggcgttcaaggctggctcaacccctcccctcttaratttcagttttcacaggtctctgctggtgagcatttttcatgtgttttctcatccacagagctggctggcattcagggcagagcaagggtagaaatcttggcatcatgcctcttggttcctcacacatcaaggccgtgtcctcacaaaatgtgcaggaaagggtgtttttctggcagccggggacggcctgcatgaggcgatgtgaaacgaagagggcctggccttccctgctggggggtgctgaggaca

SEQ ID NO: 923 - DNA, 501 bp, Bos sp.
  misc_feature (427)..(501): Nucleotides uncertain from position 427 to 501
ccaaatttctatcagcctgtttgcgagtaatccttccttctaccccagacccaggcagccaccagtgtgctttctgtctctatagataatttgtcttttctggacatttcatatgaatggaatcttacaatatgaagtcttttgcatccagcttctttcacttagcataatctttttgaggtgcaaccatgttctagcatgtatcagtatttcgtttctctttatgtctgagtggtatcatattggacttycctggtggctcaatggtaaagagtctgcctgcaatgctggagacctgggttcgatctctgggttcaatccctgggtcaggaagatcccctggagaaggaaatggcaacccactccagtattcttgcctgggaaatcccatggacagaggagcctggagggctacagtctgtgggannnnnnnnnnnnnnnnnnnnnnnnnnnnnnnnnnnnnnnnnnnnnnnnnnnnnnnnnnnnnnnnnnnnnnnnnnn

SEQ ID NO: 924 - DNA, 501 bp, Bos sp.
tccagtattcttgggcttgcttcccttgtggctcagctggtaaagaagccgcctgcagtgcgggagacctgggttcaatccctgggttggaaagatctctgggttggagaagggaaaggcaacccactccagtattctggcctggagaattccatggactgtatagtccatgggttcgcagagagtcagacacgactgagcaactctcactttcacatgtaccaggcactgttctagaccttagagacaawtcagtgaacaaagcaaagcccacattcacacggaacttttgttctaattagggaagatgtgagtgatgagtgcttttaggaaaatgaaccaaggtgaagaaacagtaacagagttggggtttgtaacagttagaggcctccggccttagtagccagggaactgctctgtgatgatcctttgtctgtagagatgtgagtgaaggaaggcattgaactacatggggaaaaccccccgatgagggctgcactt

SEQ ID NO: 925 - DNA, 501 bp, Bos sp.
agtttactatggtacttttgggctctgttggtctccctttacctttgagtagagttgctggattcactaaataaaaaaagaaaattcacagtgaaattttgatttcagataagcagtaaatcattttttagtgtaagcatgggacatgcatcatactgaaaaaagatggaagaaacaattgaaattcaattgaaaaccaattttttatctgaaatccagatttaactgggcacctgaattttatctctctrttgggcagacctaatcttgattatagtgctttgtgagagtcttgtttctgcaagggccatggtcaggatgtgaattttgctgcctgcattctgtaattggtgggcagaaggaggcaggaccttgaacatgctgagtgtttataagaaaacaaattctgtgctcttcccccttcactccttcccctcccccagttttttctctttagacaggattcaggatttcagtgttgagatgcaacatcttgatagt

SEQ ID NO: 926 - DNA, 501 bp, Bos sp.
ttctaataacagcttctctcaaaaatatactggatttctatagtaattcatctccatttatgtgtttgtctgtccttctagcatcatttatctacattaaaaaaaaaccctgcttactctggaaggtgctaagacagacctccagagtgtcagcccccagaagaagcctcgtgtcctgtggtctctgccaggtgccatgtggatttgccttttcaaagcaacacatctggtcatcactcaccaacctgctyggctcttcctggaatattttcactgcctttccacttcactcagatttgagagagttaattatttaatacgtttgcaaagcacattgggttccctagagaaagtgtgccacgtaaatatatataaatgaataattaattaaagtgtaagcagattacttggtgatttcttccttaactgccccattttcctaatgagttgttttgaagttccactctgggtttggtttctcgaccctcctccttccacaca

SEQ ID NO: 927 - DNA, 501 bp, Bos sp.
tgcagcctagggttctgaatttctaataagttgccattttattctgatgcttgttctatagaccacacattagaaagtataatatgacctcaaactagtgaccctctggagagaaaacaggagaaagcgtatgtatctgttcagtctagttcgtttcccttcacacaccaaaagtaaagacccagataatagggccatcattcacctaccatttacccatttatttaccatccatccttcctttcatctaytctttcatccgctcattcatccatccatccaagaaatatttattaagcatcttccatgtacaaggacccaggtatcaaagtccatattgtagtgaaccacagcttctgatacgtaaaagtagaacataataaatacatgagaaagatcattttagaattcgaagattgccataaggaaactaaattagcacaaagcagtggagagtaatagaggctatgtatacacctctcggttccccagggctggatt

SEQ ID NO: 928 - DNA, 501 bp, Bos sp.
cattactgaaaaccacaaggagggcagctattgctgcaatgagattgaatgtcaaacaagattatttaaactttggcccacatttgcttttccagtaaccttttttgttgtccttggaaaaattcaggagctaaaattttaccatttccagtaaaattatctaacgaagggttcacccttcaacttgctgatgtagaactttagctttaacaaattaccataaatttggttaacctgatgctgagaactcygtaaggtccttgaaattgctccaaataccaattcctcttctgggattttgttggctatgtgacaaagtggtatttaaaaggctgttaatctatatggtgtctaaatgcctgggccatgtgtgaagtacaaggtcaggagatgctgacgtggcccaggaatcattggtaaggactctgcctggaaagaagagtaactttttcctaacagttaaggtcttttacaagcttccccacatttgtcttttctcat

SEQ ID NO: 929 - DNA, 501 bp, Bos sp.
ggggatcttcccaaccccagggatcgaacccaggtcttccacattgcaggcagattcttatgcacagggaagcccaagaatactggagtgggtagcctatcccttctccagaggatcttcctgacccaggaatcaaacaagggtctcctgcattgcagatggttctttaccagctgtcctaccagggaagcctgataacttgctagttatcatgtattaatgcttaaggtccacaagctgattaacttacyaggtaattgctgctggatccgtttaacattgtaaacctttgatttaacaaatcttatttttaactctttcctaccataaaagttggtgtcagtttttacaaactttttctcagtctcagaaagcgcatctccaagaggagagcttctcgaatgtttcctatcagggaaaatgtcctgaagcaaatgtgacttatccattcttagagtctttagaattctgaaagaggggaggagggatgcagcccctcaa

SEQ ID NO: 930 - DNA, 501 bp, Bos sp.
aatgtttgcacatcctcttgatttgatccccacaatcaaccccatggtgacaccgaagcgttatctctcccattttagaaagaaggaaagaattcacatttcacagagcctttattcctagacacattctgacatttttttcccccctgagcttaaaataggtaattaaatattccatagttgtgctatggactgaactgtccccacatttataagttgaagccctgaccctcagtgtgactgtatttggrgatagggcctctaaagaggtcatgaagaggttatgtgatggggccccaatgcaaaagggttagtgtccttctaagaggagacaccagagggaatacacagggagatggcagccacctacaagacaggaagaaaggcctcactggacactgaccccatgggcaccttgatcgtggacttccagcctccagaatttgtgagaaaacaaaagtttggtttttttttggcgccatccaggctatggtacagtat

SEQ ID NO: 931 - DNA, 501 bp, Bos sp.
cttcacacaatctagggacagctcaggggaacaaaggtaaggaagctctggggtttttttcctaatctttttcctgtctatgctcatttttatatatggagcattttgtgtgcttttccctcttaactactgggagaggtctcataatgttatcaactccaggctacagtttttaacttaaacatgcatcagctaacatcttgcttgtgatgaaagactgagagctttccctctaagatcaggaacaagamaaggatgtctgacatccacttctgtttgaccttgtattggaggtttcagccacagcagttaggcaagaaaaagaaaagacagccagactggaaaggaagaagtaaaaccattttcaggtgagatgatttttgtataaggacgccactaaaaaactctcagagcttattcatgagttcagcaaagctgtgggatgtaagaccaatatagaaaaatgaattgcatctctatacacttgcagtgaacaatctg

SEQ ID NO: 932 - DNA, 501 bp, Bos sp.
ttggtggtatgactgggatgtggcggccggtcacttggatggaaagtagctccttgctttctcgtgctccttctttggggaggcttgttaatgtgtttggagacgcaaggattggaccttaatctcttgctgtgactttccaatagtccaggggcctgtggtgagagaaccaaactgcagttctgcctgtccctacacttgtattgtccacaaagcgtccaggcactggccttattcacagatcagactcrtggtcacagttactttaggctaggccacaggtcggggggtgggagtaggaaagaggttttcctccaaagctttagactgtcattgatatacataaaatttggagaagctgaaagattgtcatggtaagtgtatttcaagaggggtagaaaggtgtctgttatccttcagttataaagaagattatgtttgtgggaaacattagggaaatatttccaggaggaatggcttaagcagtttaaacaatttcaa

SEQ ID NO: 933 - DNA, 501 bp, Bos sp.
atccatgcactttgtacatcgatcacttctccaaaaacctccactctaaagtctttcaacagaatcctcaaacaaacgcacaaatgtcctcagaggccttttctctaaagacaaaggcagaatcctattgttgggaaaagtcaaccttattattgcatttccaatagtaccattcatctttcagagtgaggggctgaccgctacatcagtggtatgacatttgtaaagcaacagattctcaatatattatygcaagaatcaggcaggcgagtctcccagtcatgcatgattttttttttttccaccacaagccaccaccaccacgggaagaaacttgtctcactccagcagcaaaggcaacctaaaaatgatatcctagagcagtggggctgccagtgccgctgtatccttcttaccataaatgagcagtttcttgactcattaataacaatttcccttaaaagaagtaatctcctatcagtcagcccctcgccaccatgc

SEQ ID NO: 934 - DNA, 501 bp, Bos sp.
cagcaagtgtgccttcgatgatggagtgactgctcagtgcctagaaattctgaatcagcatcacagggaacatcaggcctgggtggctgtgacttggctatgtggtagaaaccctttcagaggaacacattaataactcactttgagtctaagtctaagcttccagaataatcagaagaccttgtctgggagggtgaccttgccattctacatctttagagaatgcctctaccatgcgtatagggtaccaratcacattttgtgtgattagctatcatctcttgaacacataagaaaatgtagcttgcaatagatatgtcagtgcattttattttagttaatcttaaaaaatagagtcacccaccaaatcagaatgtgacttaggtatgaacatatgttaaacttgccatcatttacaaactcacagccaatactgcacagctgttgtcagaggcaccgcgaacaacatatcttttatcacctttaaaatgtataatttct

SEQ ID NO: 935 - DNA, 501 bp, Bos sp.
  misc_feature (500)..(501): Nucleotide uncertain postion 500 and 501
attctgatgaagtcaaatttgtttttctcttttagtcttggtatcatgtctaagagtcagtcccttgccaaattgaaggtcacagagatttacccctgtgttttctttcaagccttttagagtgtcagttcttacatttaggtccatgatcctttccgaattaacttttgcctatggtatggggtcaaggtccagatccatgcttttgcacgtggcctctggtcatcccagcatggttgttggaaagactrttctttccccttggataacatccttttttttcagtagttcatagtcggtaaaatttgtgttaataaaaaagagatttacccaaaacagcactcctcggtcttagctgtgggtgtgaaattggcaccgcttctgtggcagccactgcgccctgtatgcacacaggcccttcataacgtgcctgcctctttccccactgtgctgacccacatgtcttgggtgtaggactggaggctccagtattggattcnn

SEQ ID NO: 936 - DNA, 501 bp, Bos sp.
atctgatgcgaagagctgactcatttgaaaagaccctgatgctgggaaagattgaaggcaggaggagttggggacgacagaggatgagatggctggatggcatcaccgactcaatggacatgagtttgggtaaactccgggagttggtgatggacagggaagcctggcatgctgcacttcatggggtcacaaagcgtcagatacgactaagtgactgaactgaactgacagttgacctttgaactgttgarctttcaactgacagttgacatgagagttaagatcacctaccctccagtgttgaaaattttgtatttggctttctgtatccaaggttctaatccacagattcacacaaccatattgtgcagttctcaatatttactattgaaacaaatttgtggatgactggactcagttcaaacctatgttgttcaagggtcaactgtatacacatatgtgtgtgtgtgtgtgtgcatgcgtgcatgtgtgtacacacac

SEQ ID NO: 937 - DNA, 501 bp, Bos sp.
gctactgtattctttattcagttcttgtagtcacaaggatattaaaattccatactttaatttgtctctttctctgaggtactggtgatctgtttcatgtccccttgaattaattgatatcctgtgatttttgtctatgttatcccctccacttagctcaaagtctgacagcgagttggtgttcattgaaaatgcactgtgctgtgggtcattgagaatacagagatttgtaagacatttgagaggtgaakttactgtttaggtggcagagtactagatccagctccaacaccatagaatttgcttttccaaagaatactgttaatatcacataggagttcttttaattatttttctctgacctgactttgtttcaggtatctttgcacacttacactatatgaaatactgtatcatatattgtaacgtgttggctcaaatgcttgcttttaagttgtctatggcctgtgagtaactagtaagtatacatacaggttttca

SEQ ID NO: 938 - DNA, 501 bp, Bos sp.
aaattttatgatcataagtatctataatatttttaaaacggaatttaaggtgaacattcatttttttcagatttatcacaagcaagtaactgtaagattttccatatcaccaaaagaatgacaaattaattaattgtattgtttatacatttattttatgtgaaccattttaagattcaacaaatctattataaactaatattctaaaagcatagacatttcagttgatttttttcaataaacacgctagkagggtcaccaggtaaaaggcagaaaaattaattaaatttgaattgaaaatttaaaaaaaactcataaaacttagtataaatatgccccaaatattgcacataatacaattacacttagaaaaagaaagaaaagatatttttaaatttaaaattaaactttattttgacttagaacaacataaatttttatcttgagattctgtaggttagaagttcaacaagggtgaaattcaagatgccaccaaactta

SEQ ID NO: 939 - DNA, 501 bp, Bos sp.
gatggcatcactgactcaatgtacatgagtttgagaagcctggtgtgctacaatccatggggtggcaaagaactggacatgactgaacaacacaatacactgaagttgtacctcttactgatgctcaactcaaaccaactttacccagtgggagcctattcaagttgactcctgagtccttttacaagaacctataagtttttgatatcttctttgcttttctgggaagtttttagcttgtatttcctacyttagacctggcatcagacacgttctccaggaagcttttattcttgttagtgggaactggtattaagaggccacaaacatgagtgcagggtgctcagtgctactaggctgctactgcggactggacctcttgccatctctattatcaggatgacatttacagctgtttgggctcttagaatctttagcaggtaaaaccaggttaaagaaaaaaactggatttaccttcaattagaaaaaatgttttctgtg

SEQ ID NO: 940 - DNA, 501 bp, Bos sp.
atcttgaattcacttgaacatatatatatttaattatattcatataataatatgtaaattcaaatatatattgatttgaattcatttatggcactctcatctatttcattttatctacttatccataaccctttgttcctgatgcctaccacagtgcttggggccactgtatttcataaatatttgctatagaaattaaacccttattttctgcttcatgaggtctccttctattgcctcttccataatgratacagatgtcagcacatagtaagtagcttgataagaacttgatcaactgaactgaactgaccccttcaaactttgtttcctgagttcaaagggcctcactgtcaacaccacttagacaacccaggagcttaccttcccactgccaagaggaggaggtaacactatgcagaaaagtccccactctgacaagtctgtggtggtagggggtggtctggtttcgtggtcagagacctagcaatcagctagaga

SEQ ID NO: 941 - DNA, 501 bp, Bos sp.
agaaattgaacacctgtgttcagtctgctgttttaaccaagaatccagattcatttactcttcacaattctgaggtgtaatttataagtgtggttattttccttttacagtgaagagaggcaggtaaaatacttggcttaaggtcagtaagtgggacttgaacttgagtcaggcttaaaactctgacatctatttcactgaatagtattgtgcttcaccttgtactcaggaaaaacccttgcatcacatakaccttaagttgcaatgctttaattctagttatgtttttgaatttattagcccagctacttctcagttaaacacacttgagaggtcggccttgaacagttgtctgagcaaggtttttttccttcccagctgttcatttctactttgttgaaggacttcatggcttctgaagtttgtgttagcattcccttcagcagttcttgaagggttgagggtcaaaaactttctgttgtttcagccttttattcaaac

SEQ ID NO: 942 - DNA, 501 bp, Bos sp.
ggcaggcacactgttgaagaaccagcctccaccagcttttctttatcacgaaggaagtcagttcttagcggcttcaccaagtgtcacgatcctggtgactgaatgggaacaggcttgcagacaagctttttgacatcagcctgatggtttcagtttgccaatgtgattctggggttgtgctcttgtgcacagggccatcatgaaggctttttttttggtggcggggttgttgtactgctctgggtacattrttctgcaaataacagtcaaagttgaaagccttgtctctgggctgggccataacaaaatacattttgaagactgagtgtgactccataagccttcactgctgacatccatgaaggctgtgctccatcctcctactatctccaattcaactttttctggaactttccacatgctcactccatcacattttgtttcatttcattttaggttctagttgctatggattgaatgtttgtgtcgcagctcccaaga

SEQ ID NO: 943 - DNA, 501 bp, Bos sp.
gggttgaacatataaattattccattgaactacaaaataaaatagtgtcttgctaataacaaaggtgttgtacaaaaaacaggtatcgtatactttgtagaccaataacttaattgtatctgttatgagccttctattctacaagaaggagtgagaaggtttgatatgcacacttgtgtgtagggagagatggatagtaaaaaaagttagaaagaaggaatataagcggggaagttgactcaggcatgaastgatttaattccatcttgtggcaagggagtatgtaaacatgaagctaagagtttgctagtgagtgagcaaagatcacagattctgtgatattcttggggttaaaaaaattagtatgttgccccaaatgacacagggtggcacaaagattattagcatctaaacacacatcttagcctacctttggccccttgatgattgatgactttcatttgttcataaagtcattcaatttacaagcatttattgagc

SEQ ID NO: 944 - DNA, 501 bp, Bos sp.
cataacactcggtcgagggctgcaatggatccagaaacccaaactggtgtctgcctccagacagacagggctggcatgtgggctcgctaccagaacctaccacgggagttaatcctcctgcctctcactcacactcgggtcacctccgtcctccttgaagtctacttcagtacctattttaaaatacatactcttccccagggggcgccttccacatagaggactgtagttttctgtaataaagcaagaaraagactccacaccatcaccagatgacggagagaagtgtaaatcacaccaaaaagctaaagggtatggcttccggaggcaacttgagcatcttatatacccagtgagtccaaactggaaggtagataacttacgcaaagcaaagctggaaggtaataagttacagccgaaacgccatctttccgctcctctctccccgcctccgagacactcttttccagtggaaacttgtgcaaatacgagtgggcgctg

SEQ ID NO: 945 - DNA, 501 bp, Bos sp.
ctcctttgaaagataataacagcaacgaatgtgtaaacttcctcatgtccaagtgacagtcctgacccaggtttatggcctgattcctccatcatattctcttcaaaagtcacctctgtaaagttttcaaagtctaaatgtcttactagaatcttttgaatgagttaagaaaatctgctcagtgcaaagcacatgcacatttgagtcactattgatcttaaattgctcaaggtctctctagccattttaargtttatctgtgtgtgcgtataaacaaatattcatatatatatttacaggaatgtatctacccccttagatatatacatttgttgtgcttattgaaaaaaaaaccctccctacttaaaagttccaagtatatgttcctttcatgtgcttgtgcacctgtatatttagcaatgtccatatgccccatggatctcttacccctcagtctatggagctggcaactatggtaagggtgccctgcttagatctgtc

SEQ ID NO: 946 - DNA, 501 bp, Bos sp.
tcatagattttataagaatcctacaacagaacacttacatatcttccttttcttttaaactattattataatatattttaggctcctattgctttcattattaactttatgtgtgaaggttcagggttaaaaaaatgcctctaatcacacagccaatggttaaatcctggctctattatttactcactatgggaccttagataaatcattttacttatctgttcctcagtagcattgtctacctatcatgrgatgttcaggtgtgatgtgaggaatacatgaaacaaggcatgctgtgcaaggcccaccataactggcccaagtggagctggaggacatagcctcccttggggccaaacacaaaaaggctctcagagccgcaagtaaacagtttcctagggctgagcacaccctgctgcttggtcttcatgatctgactctctgtgacaccaggagacaccagcagatgccaacatgaatcttagagccaaacagagggag

SEQ ID NO: 947 - DNA, 501 bp, Bos sp.
tctgcttctactgagataagttataggcgtttcctaaatgccaattcctctatttgatgcagcattaggagagagtgccatattcaaatgaaaatcaccaatccctatgggaacagagaaagacttctttagatggagctgactggaatctcctcagttggaaaatgaggtaccctggtcctgggtaggtccttcttgtagctgagtcactcctgccatgacagctcagctcaaatcccaaatgatgactrtgactatgctatttccctctctttcttttgctctcattcttcacctctctctttttcttctttcctcctagcaaagatgactttagaaaaatgtgaaagttaattttatgtgtcaactcaattgggccatagcgtgcccaggtatttggtcaaacattctggatgcttttggatgagattaacatttaaactggtggactctgaataaagaagcttgccctccatgatgtaggtgggccctgttcaacgt

SEQ ID NO: 948 - DNA, 501 bp, Bos sp.
cgttctgaggtcatttttcccccgtaaagtagttttctcttcagttttaaatgatggagcaggtctttgacaagtaattttttttttaggttccctgccgcaattgagaatctcttgttagaaataccaggcattgctctctgcttccttcacagatttccaatgaaaaggagcacgtccttccaggacttgcccacactcaagatggcagcatccattggtacccacgttgcaatgatgtgggaaattartagtgtacacagttgccatggcatttattgcagggaacgtcctcaggggacctcagttctctttggccagtgagttctgggtctgaggattggctcaggtctggatcctgataagggatggtatttcttttaggcagctttctattaggcaatgaatctcagccctcaactcagtcattcttgatctattaattatgacactaagcaacactctctgttggctgtccatctgcctcgcctctagaaatac

SEQ ID NO: 949 - DNA, 501 bp, Bos sp.
cgctattgtgcttgttcatgctcgcgctcagtcgcgttcaactcattgcaaccccatggactgtagcccaccaggctcttctgtccacggaattttccaggcaagaatagtggaatgggttgccatttcctcctccagggaatcttcctgacccagggatcatctcctgcgtctcctgcattggcaggtggtttctttaccactgcaccacctggagacccacattttgatcattacatggtctctatatytgagttcagttagccagcatgtagaggtcatggagtgtgtcatgggggtggcagcagaccggtcctgattcagtgttgaggagcatcctcagtgactccatagttttatgttctctatattttacttacaatgagtctaagctcctggatagcaggaatcatctttcacatatttgtggcctaagaataacttcactcattcactcaataaatatctcaacagcacttagcgatgagccaggcactgtgc

SEQ ID NO: 950 - DNA, 501 bp, Bos sp.
cccacattttgatcattacatggtctctatatttgagttcagttagccagcatgtagaggtcatggagtgtgtcatgggggtggcagcagaccggtcctgattcagtgttgaggagcatcctcagtgactccatagttttatgttctctatattttacttacaatgagtctaagctcctggatagcaggaatcatctttcacatatttgtggcctaagaataacttcactcattcactcaataaatatctsaacagcacttagcgatgagccaggcactgtgcaggctctatatttaaaaatatgagtatgatgggatctttgcccttgagaagctcatagtccagccagaaaggcagacaaaagacacatattcagtaatgttttgtgtgtgctgaggggttaaacagaaggtaggttcagaagcactaaataatgagattaccttgacctgtataaagactgatgaaaggaagtttgcttgtatgatcgttttcttgaa

SEQ ID NO: 951 - DNA, 501 bp, Bos sp.
tgagctttttgtttactttaataacatcaacacagagagatgggcctattgctggggaactaaatgtgattttagtagcttttattgaaaccgttaactctacctggtaaattgctactgtattctttattcagttcttgtagtcacaaggatattaaaattccatactttaatttgtctctttctctgaggtactggtgatctgtttcatgtccccttgaattaattgatatcctgtgatttttgtctaygttatcccctccacttagctcaaagtctgacagcgagttggtgttcattgaaaatgcactgtgctgtgggtcattgagaatacagagatttgtaagacatttgagaggtgaatttactgtttaggtggcagagtactagatccagctccaacaccatagaatttgcttttccaaagaatactgttaatatcacataggagttcttttaattatttttctctgacctgactttgtttcaggtatctttgca

SEQ ID NO: 952 - DNA, 501 bp, Bos sp.
aatcatgactgactgagctaagctgggtctggagagagctcagggacaggacaactcattttatcagtgacttaaaggaaggtgatgtcaatgggggctgatctcaaagcagcacctcccaccctacccaggaaagcaggagattagcagaaacagaggttaatcctcttcaggacagcccacgcctgctcctgctgccagggaggaagaggggtgagtgtagggaagagcaaggatgtgcaaaaatgaamgtaataacagaaagagggacagtttacatttttaaaaagaaaccatgtatttaaatcaagtggaggattttaaatcaactatgtgctgtgctaaatcacttcagtcgtgtctgactctttgctaccctgtggactgtagcccaccaggctcctctgtccatggggtttcccaggcaagaatactggagtgggttgccatttcctcctccaggggatctttctgacccagggatcgaacctgcgtctctta

SEQ ID NO: 953 - DNA, 501 bp, Bos sp.
aagcgacttagcagccccagcagcagcagcctcgtagcacctgttcattttccatgtgtcctcccacccttcattctgacctgttttaatggctgtgctgattcaagagggaagaggccacctttcttctagcttctgtggcttccagagccactcacatccttgccctttcatctgctcactctcccactgctctgtaaaaagatgctgactacacttacataactttcgccaagattaaaacatatggrgttgctgatattcagtctatgatggctgtttcatatgatcttagcctaatatataccaggctaagatatatatattttatatacactatataaagtacagtatatttataatacatgtagacctgatttaagagcgactcagtgctattaatttatcagcattaatcataccttaggaagcattattatcatcatccttgttacatctgaggaaactgaggcaaagaaaggtcaactaacttgcccatag

SEQ ID NO: 954 - DNA, 501 bp, Bos sp.
ctagtcccctgaccaggaattgaacccaggccctctgcattagccactggaccaccaaggaagtcctgtggtcagctgattctcaacaagggtgctaagacaaatccacgggagaaagaaccatctgttcaataagtgctgctgctgctacgtcactcagtcgtgtccaactctgtgcaaccccatagacggcagcccaccaggctcccccgtccctgggattctccaggcaagaacactggagtgggttkccatttctactagatgactaaacaggcaaatgaatgaagttgggtcctttccttgaactggacacagaaatgaactcaaaatggattacaaacctaaacataaggcataaaactcttatgaaatcctaagagtaattcagcatgactgtggcttaggcagagcctttctaggtacaacatcaaacacacacacaaacaaagctgataagccagactttatcactttaaagaagtgaaagtttttgtttgg

SEQ ID NO: 955 - DNA, 501 bp, Bos sp.
ttgaaatgttgagtacataatgaagcaactttgttatgtaaaacctttgtattgtgataatctggctggattttttaccattattcatgaatgtttccatttgtgggaatctgattttcatcttttacaatcaaagatataaatggactttctcatagatagcatatatagtgcagtgggaatttggtatgacagggttttgtttttttttaaagactatttagaaatgaaaatgaaacttctttctgcaraataaactgaaagccagtccttgccttctcagatatgtttagtcttaaatactctatatgaagtcaaaattaattccaaaaggtgacagtttgttaaagatgttttctaagttacttatgccatcctatttcttttgaatctctcttattcatataaaatgctcaacagataggaagtggagtcctattcactgagattctgctggcttttataggagaaactggcagcacttgaagcaagtattgaaca

SEQ ID NO: 956 - DNA, 501 bp, Bos sp.
tatttttaaaactgggatttttctccctagcatgtgaaactttctggtttcaattttattctacacatttaactctgaaataaataggttgctacataccacagtaattgtggatggacaggggtcagcaggaaacaatgaaactgtcaacacaaacgaacggcaactgggcatgggtagcaaataggacatgggtgttttatgaggaaagcccaggaggtttgagtcacagggaagaaagatgggttttkccatccaaattgaccacatattataagttaattaagcttctagaaattgttccagatagtggagaaattgtgagggaaacagatatatgcatatatattatctatctgtacagaggagtcaggggtggaacccaaagcaaagtctggcactgaggagatcaggggacaagtatattagggagagaagaaaacagagaggtgggactggagcgataagaggagatgagaacaacataaagccagagggtga

SEQ ID NO: 957 - DNA, 501 bp, Bos sp.
gtactgtcactgtctagtactgaggtgccaatccaaggctcaacaacccaagagcaggcatgaagaaagccaccattacatttttccaggtttcgggtttcactggagaatttaggcctataaatgggaggcgaaaatttccaatgaaatactgtgttaggaaccaaaatataaaaagaacagttgctggagtaataaatgagaaggaaaatgaaaaactggagattgcattgagatgtttgttatttttkggggtagagcagtatccaagattggagttttatgatgtgactttggccatagtaaaagttgatgaaacttaagataaagctatcagaataaaatttcccagagaactaaaaggccaggattttgaacaatgtctttcacagagaatagattatgaacaaacttggggtagagaggaaatgtaatcacagataatttatataataaccatgacccagtgtggaagcttagtgtaattatttctagttaata

SEQ ID NO: 958 - DNA, 501 bp, Bos sp.
tagtctcatttccattactgtaaagaatctaatcatctaattgaatctttacaaaaacagagcttggcaagcagtcagactcaggttcagctgctcactgctcaaaagccaatatttgaaaggcaaatgttggtaaaaagaaaagttactttcatcagaaaagccagaaacctgggaagaaggtggactgatgtcccaagaccaaatccaaagattctgctcaaccttgacagtctttaaaggaaaaaaarggggggaagaatctcagtgaatcatcaaggtaggaggttggattctgcttcattctccaatgtatacagactggctgattctttcttcaggtgttacctttcccacgtgtaatttatcttagccctgtggtagaaagccagtcattctttaattacttaattcttcatgtttattttaatctaggtaaataatcaatgggttaggcaaggcatggtgtgcattcaagagagcattaagtcaggagttagg

SEQ ID NO: 959 - DNA, 501 bp, Bos sp.
actgtaaacttatctgaagagtgtcgacaaagaagagatgaacctcgaaagcatctagtttattaaaatagctatccaaatggtattaagcgtgttgttatttccagctgaattctcataaacatctctttgaagcataattatatcctcattttagaagagaggtacttgaaacccagaaagaataacttgcccaaagacaggtacctagtaatactactagtagtaataacaatcacttactgggcatstaaaatgtaccaggtactgtgctgaaaaccttacatatatttcaacagcgcctaggtcacaacgatcctttgaggtgtatacttttattttaaccattttacagatgaagaaacggagacaaagagagttaagtagaaagagctattaagtctcagactgggacgggagcccagcgtctttcctcaggctctatgtttttaactgctatgttttattgtctctcatttagaagtcaagtttgtttaatgc

SEQ ID NO: 960 - DNA, 501 bp, Bos sp.
ttttctgcaaacctaaaactgttctagaattaaaagttgatttttaaatccttttctcaggatgtgggggatggggatcagataggtcaccatgatcgagctggatgttctccagagtttgctttaaccaaaggtgttccaagttactgtgtgtgtgagtgtgtgtgtgagtgtgtgtgtgagtgtgagatggatgtggtctagtgtgtgtgctccagtctcatgtacattataaactctgcttggatgayaacagtatatcctcactggaaaaaaaaccagcaacccacgagtgaataagcgtgtccgcagcctggtggaagagtgactgatgctgtaactgaactcatcctcaagcacagctccgaatgcctgttaggctggaaaactgttgtgctgcgtggtaactggacataaaccaaggcggtcacatggctgattcacctgggctgctcttttgtcctcttgattaacgacctggtgtttctctacgtggtaaaa

SEQ ID NO: 961 - DNA, 501 bp, Bos sp.
tctagcttctgtggcttccagagccactcacatccttgccctttcatctgctcactctcccactgctctgtaaaaagatgctgactacacttacataactttcgccaagattaaaacatatggagttgctgatattcagtctatgatggctgtttcatatgatcttagcctaatatataccaggctaagatatatatattttatatacactatataaagtacagtatatttataatacatgtagacctgayttaagagcgactcagtgctattaatttatcagcattaatcataccttaggaagcattattatcatcatccttgttacatctgaggaaactgaggcaaagaaaggtcaactaacttgcccatagctagcaagagcaggtgtagtgtttgggcccaggaagtctggctttggagcccaggttcttaatcattgcactatgataccccttgagagtggtatcaccaagctgaaaataaccaattccaagctta

SEQ ID NO: 962 - DNA, 501 bp, Bos sp.; identical to SEQ ID NO: 687

SEQ ID NO: 963 - DNA, 501 bp, Bos sp.
gaatattagtgtgggatttgattaggtagataaaaacggaggcaagaaatctttactttggcaagaagaatggagggttagaaatggggaactgagttggaaccaagaacagaatatgatgggtcatgcttattagcaagcagaaaagatcaatgagagaacagttaggccaggattgtttataacagcacagacttgactcagaggggcaaaatttgcaaaaaaatgaattgctaccacttagaatttakatttgtttttgactggtggctctcaaaacgtgacctgcagaccccatggagtccctaggagactatgcaacgtcaaaactattttcacaatagtactaagacgttatttgccccccttactatgttgatatttgtaccatgttacaaaggcagtgctggctaaaaggcttagtgccttaacagaaatcaaagcagcgataccaagctgttagtagtcactgtgttattcattgccatatacagtcatcag

SEQ ID NO: 964 - DNA, 501 bp, Bos sp.
cccagcatctctgccaaagaagcaaggttcaggtcccctttgttcttgagtccagtggtcctttatgctcttatcaccttctagtcccatttgccttgatggttctttctacagctggggaactgttttgctccacatctgctctcagttctgggcttggcttttggaaacaggaagacactatttctcttatctaccctgctatatccctcccttcaagttgggcataaagtcaaccatatccttatatrgaggaaaggggacaggtagaaaagtatgtatacagttcaggatcttaaaatttgatcccactgcattaataaatggtgttgagaaaagctggctatgtaactggaaaaatggtcagattggctccacacctcaccacacatatcagaatacacattcagatacatgtgcagttttgtttaaatccaaataaatctagaataaaatattggtttcctatttatttacattcagtaaatttactttttttgg

SEQ ID NO: 965 - DNA, 501 bp, Bos sp.
cctcctgtcttctatcaatatccccagcaatgtctttaacttcattgtattattggaaggcagaagcacagtttatggagtcaacctgactaatattcaaatctgattctaccattacatttaaccttgagcctaactaatatctcttacacggtgttcccgtttataaaattatagcagctatatgacatgattttttaaacagtcaatgaaattatatgcacacatgtgtatacataacatacgtgtgwgtgtgtgtgtgtgtgtgttcagtgttttgaaaagatcctggcctggagtaagtgtacacagtgagtgtaagataaaggcctgccattgcttttatcacttattattactcttgacttcaatctaattctctttcaggaactagaaagttttccagctacccatgaagagaagaatgagagtcttaacagcacggacactaagtctaacactgcactgcttttctctctgaggcagctctcttgcctcctc

SEQ ID NO: 966 - DNA, 501 bp, Bos sp.
atccaagaacacaatcagttaaaacctaaatatacttcattatgtggctgtaactttcggcatttagtaacagtatcagattttttttctctcaagtaatagttattaagttcatttcttacttagatttccaaattaaagaaagcaggtaatcttgttaacatagcttacaagaaatttcttccagggtgcgggaaaactccgcaaatgaggcaataaaaaaaaagagggcttataagaaactaagaacrctaacatttgtgctcccattatgtgtcaagtactgtgctgggtgactaggtagttccatgctatcccatctaatcagcaaacaaagtatgctaaatgcttattcaaaatataagaatactcattaacacatacataccatgtttgataaagctactctgtctttaggaacaaccaatgaaatatcaaaagttgctttgatggcaggttcatcccagcaaggaaaagctctccgggcatcagtagccttaa

SEQ ID NO: 967 - DNA, 501 bp, Bos sp.
tctagctccacaaacagttgtctatcagaacaaccacaggcaccctgaccatcagccaaaacaaaactgggataatacacaagaagcaataaccaggagggagaaagaactgggaaaaaagagtgtgatacctccctcttttccttgtataactcgacttctgtccacaggccccctggttgctttacttcacctctatgtttttcaagcaacttgaaaagtttcaaacaagatcataataggacagttcrgctatccaacagaatctgttcattacaaagcgtgtttttactttcagcactggtgtgtttatttaaaaaaagaaagcagaaagaatgaaagagagaatctgagcaaacacaattgagctctcttttaaactcagaaaacatcactgctgggatttcagttcactagaagtgacatgccggagaagaatgcaagatatttaggacatttgtgctcctaaccaagacaacagcaagtgtgccttcgatgatg

SEQ ID NO: 968 - DNA, 501 bp, Bos sp.
gtgttgggaactgctcctgaggaaacgccttcaaaaccaaagtatattgatctaaactaaatgaaacacctaggaacacttagttgaggcagacttgggttacctcggttttcattattagccacggttttgcatgattctcttggcttttagacctcaagttcctttacctacagtagagattctaaataatctccaagtttcatgctggcttaaaaaaaaaaatggtgccataattttgtggtgtttckccgaccttgtaattatttcctaatcagaaacacatggatggcttttcctgcttttaagagccaggggcttggagtatagaaacctgggttcatggctcagctccttcacttagggctgtgtgaccatgggttagttacctaatctctcagcctcatttgcctcctctgggaaacagggataaagcaccttatcttatatggttatggtgaggataaaatgagataaaagtaccaaaagaaaaaaaaaaaa

SEQ ID NO: 969 - DNA, 501 bp, Bos sp.
caagaatactagagtgggtagcctttcccttctccaaacccagatctcctgcactgcagattctttactgtctgagccaccaggaaagcccctcccttaccattatctgggtgctgttcatagaactggcctaaattctcgtggctatcttagagcctagagctagcagacgtgatagccagttaaaggcctgccagttctccaacttggtggacatgtaggactcgagaaattctggtagctgagataasctggcttaaatcaaaatggaatggaagtcaggctggcctgatgcaggagattcacaatccgcaaatgggaaaatgggcatttccaataaaagcttgtttatactttatctttaaaatatttacttccctaccctaactcattcttcatatctcatctgaaaccacctttcccaagacatcagaaatggctccaatttcttctatatactttctaagacttttattttatattggagtatagttgattacc

SEQ ID NO: 970 - DNA, 501 bp, Bos sp.
catgggacactgttgcctacggcatgtcatacaatttgcttacttactgtgtgctttttggagcatctaaagaaatcaaagctaggggctggatctctgtttgttttcctacagataatgatattctcccaccacctaagttaatagattgaagcttgcaggcatttatgagtggtgtttttaatacggtgctggaatatttgccctataaattcttaagaacagacttatagattgcctattaccagcaytatggactattaataaatcagttacaggcacgtatttttttttttgaaattgcattttccctttatgttcacattctaagcacctaaaaatcagagagagacagaatacttgtgttggatgagggttgcaatttcctacagagagatggcaggggagcagagttgacagctaggtctgcaaaggcaaacagtttggagcaaggaagaaagaggagcaagaggcccccagcagctgggtgttgttgcaacg

SEQ ID NO: 971 - DNA, 501 bp, Bos sp.; identical to SEQ ID NO: 429

SEQ ID NO: 972 - DNA, 501 bp, Bos sp.
atctaaaagcacatatcatctacagaattaaagcagtttagagctttttagcagtctttttgaatttttaacttccatggcatctgccactttctattcaattagtagatgatatatagcatagcagtaaacttgaaatctgttaattttggttttctctctttagttttataagcattgtggaatgttctaccctatgggcatatgagcatgatttaaaaatatgtagtaagtatattcaagtacaaatyctcagctcataggacagtacttatagctagaaacaaaaacagcaatacattaacacattctcagtatatctctgtcaacaagtttaatttagattcccaaaatattcatccctgggcaaaaatgccaagaaatattttaggttttaaaatttctggaactctttcaaaatttcacaagttctgaattctactaagtggtattttccttcctcttaatttgtttgggttgcaaaggaaataactttttcca

SEQ ID NO: 973 - DNA, 501 bp, Bos sp.
ggttaggaaattattaattggatagttggatgccctgcatggaaatgtattttattcaaaatgaagacttgtaactgtaagaagtaactttaagataaaggttaaaatgaatgtttataaatgagatacaagacaaaaataaataaatggaccttctctccatgtgtctcctttttcttaggaaaatgggccttgactttgcttgctgtgccccttccatcctactgaggaaccctgtgctacttttagaytagaaagatttgttcctatgataaatgggacaatgaaggaatagaaacaaacaaacaactccacaaaagtcatggaagttttgtctttgagaaaagccatcaaacaaagcaaataacactgttaagattacttcaaattgtgggggccacaaagactctatgtcatgggtgagcataagagtgatatacagatgagataaggtgaaggctgagactgaagtgaatgggtaaggaagctatacatttattc

SEQ ID NO: 974 - DNA, 501 bp, Bos sp.
accctggacttgtctcccagctcatccctggcatcactcccaaaatctaaacttgcccaaccttgatgtctggatactctcacccaaggcctgatattcaggttcttgactttttcacccactgtcaaatcaaacatcatatctggctgtgtgggttcaactgtgggcaaattattcaacattttttgctgaaggatccagacttccttttcaggagtgtaggcagagcctgtcttgcactcatttcaagrtatataaaaatgactaattcccagggagagttcctaagcaagaaaaaaataccaggatgattaatcccctcctttctacatctatggctgtttcagtcttttgagcacaaataccagattttgttttactttggaaaggtcaatattagtttaacatacacttaaagtgaaatggcctatttcaggaggctgaactcacactaacctcaaaatgataacactgagaaatgtgtagagggtgagaaaagaa

SEQ ID NO: 975 - DNA, 501 bp, Bos sp.
aaccacaggcaccctgaccatcagccaaaacaaaactgggataatacacaagaagcaataaccaggagggagaaagaactgggaaaaaagagtgtgatacctccctcttttccttgtataactcgacttctgtccacaggccccctggttgctttacttcacctctatgtttttcaagcaacttgaaaagtttcaaacaagatcataataggacagttcggctatccaacagaatctgttcattacaaagygtgtttttactttcagcactggtgtgtttatttaaaaaaagaaagcagaaagaatgaaagagagaatctgagcaaacacaattgagctctcttttaaactcagaaaacatcactgctgggatttcagttcactagaagtgacatgccggagaagaatgcaagatatttaggacatttgtgctcctaaccaagacaacagcaagtgtgccttcgatgatggagtgactgctcagtgcctagaaattctgaa

SEQ ID NO: 976 - DNA, 501 bp, Bos sp.
aaatgtctcataatggcagattcaaggagctcctagaagtatcccgaaattcacatagtaaaacacattggactaaaatcttgtctttagctctaggacttaagggcataaattagacacttctacattcttaaagttcaacggcaaaacatgttaggtgtaaattaagtgtcagacaatacgttgggttcctggggggtgtttggaacagaagaggaattttcttgaagggctcacagtttggtagtgawaaaagataatatgatacactataaggacacccagagagggctttgggatcctagaggagggacgtatttttttctatatattcttttgcagttacattcttttttttttttttttttttaccacttgtaattctagagtcctgactattacagtctttcagtcctggtaaaaccgagtcatcatttgctagtccctgcaacctatatcatctcttcctgggatccatggttatgcccctattctttgatc

SEQ ID NO: 977 - DNA, 501 bp, Bos sp.
cgagtatgaacttaaagctagcaggataccaaataaagagaccttatatgcacacactggacctgtcatggccagccccccacccctaccccaagtgggtacaggacaaagaattatgaaactgtttggtaggaggaagttatccagtaggaagcattcctccagctcaggtttgagacaccagacctcagaggaaaggaactcatgtggtctgtaaaaactaacagaagactaaggtttagaaagagaaygaacaaggagactctaaaaattctcttctcctgggatgacctgttttaggacagaaacaatataccttccagtctgacccatttccaactgaaagtcatgccaaggttgaatcttaaaactgaatttataacctcttacagaatatttcacccctacctaggggtaggggcaaggaaacaatttttaatgaatattaggtataatttcaaacaattttgctcatcagtgatactctgtagagactcatga

SEQ ID NO: 978 - DNA, 501 bp, Bos sp.
tgaccttacttgactatacttagggcttcccaggtggcgctagtggtaaagaacctgcctgcctatgcaagagacataagggactcaggttcgatcactaggtcaggaagatcccctggaggagggcatggcaacccactccatattcttgcctggagaatccccactgacagaggatcctggtgggctacaacgcatagggtcacaaagagttagacacaactgaaatgacttagtacacatgcttgacygtatgtatgtaaatattggctacagtaaattatatttactacctcattgaatatactatatcaaattcttttgagtatgaatcttgcaatatcttggctaatattgactctgacaacatttatcagtgaatatcttgttcataatggaagtcatcccaaaagatatctatcacattataatctttgagagaattagcattggaaaaaaatcacatgataatccaaaagtttacaatgtattttagatatt

SEQ ID NO: 979 - DNA, 501 bp, Bos sp.
tttatcagcaacagttcacttaatattgcttacacaaactctctaaagcagtggctagggcatatgtttagactttcccaagtgtttgggctaaagaaaccacatatatattagtgcagtgattctaagtagttattccagaggcttctaaggtaagagactcacattgtatggtttagtaacactgaaacctttccatgccccatgtcgttttatctttgttcttttagaaaaactcagaatggtacgawacatgtctttattttcacatttccaactttctttacacatatatactgaaaccatctgtctaaattgtgacaaaatctgccagttccagattggcctcattagtcatttgagcacacataaacagagggattatggaaaaataaatagatcttggatagatcatccgggtctgggaaggttttttctcatcatcagcatcattgccagacatgaaaaggcacaggtttacatttttaaaacacttggagg

SEQ ID NO: 980 - DNA, 501 bp, Bos sp.
aatgaactgtattcttttttaatcatctttttagaaccttagaaaggatttaatttagcttagttttgtatgactttcttagaattttttctgtgttacatggtatttaattttttattattgttacgttcaggacatatggaaaattattatctcttttctaagttgaaaccaaaagaatttttagcttcttaatttaaaagtgttctcgggtgtataacaagcttattgtaagtctgaactctttcctrtttacctgtcattagaagaaaaaaaagaaaaaagtgatagcccaaaacgctcaaattttagtgtacatgggattaaccagaaatttgttaaaatgaagattctgatttagtgggtctggggtgcagcctagggttctgaatttctaataagttgccattttattctgatgcttgttctatagaccacacattagaaagtataatatgacctcaaactagtgaccctctggagagaaaacaggagaaagcg

SEQ ID NO: 981 - DNA, 501 bp, Bos sp.
  misc_feature (474)..(501): Nucleotides uncertain from position 474 to 501
gtgatattaattcctaaagagaatcataatattgtagaatttagatctcatttatgatgactcacctgactcaattcatatagccaaagtgatataggggaagatcaattcaacaatatgtttaatatgatgtttcataaactatgacttcagatccttgtttacttatttgatgcaatctacttacacttccatcaaagtgtgcctctaatgtataagttacatttctaacaacaacaaaaaatgatccraagctgtgctaattaaaacaaaataggataaataactttaagagataacagcagtatgattcagaagcatgcaaaaagtgtgcagactttctgaatgaagactgttttcaggataatcggattgtttttcagattccccaaaattgtcccatttacatatttgctgttaatggtgaaaaatcctaaaagatcagttgtctaaaggtaaatttcataattatcnnnnnnnnnnnnnnnnnnnnnnnnnnnn

SEQ ID NO: 982 - DNA, 501 bp, Bos sp.
gcgttgattgacgtgttcttatacagaggttcatttagattcacagtatttagtttttggcaagaagaaggtagtgtccataggcacttccttttgcgtcaccaagacacacatcatcatgcctgtttgtgtcttttgtgactttgggttaatcagtagattcagatattgtcagccatagtggaaaaggtttttaaaaaattggtaaaagaagttgacgagaactattatatggtaaataatataggctstgtgtgtgtgtgtgactgtgttttttaattttgttttggtaacttttacccctcttcattttgcctccttccataggatgacaataacctgttaaaacagcaacttaaagatttccagaatcaccttaatcatgtagctgatggtctgattcgtccagaagaagtggcagctcgtgtagatgaagtaaggagaaaattgaaatcaggagctggagagatgaggtaatggaaggtcaggaccgccaggtgt

SEQ ID NO: 983 - DNA, 501 bp, Bos sp.
ataaaagtcctgtgttctgtccagaataatacttgaagcctgtcagcctccttattttcattccatccttcacttcacccttcatctttctgcctccttttgagtcttaatatcatcatctgacgatgcccagcagttacctaagcatctgccctctccaaacttctctaagtccacagtcaggcctacaagctgatggggtatcattaaatcatctgccctcctcctgcctccggagcttttttttgacrgataaagttaaaaaacaaacaaaagaaacccactgttacacagttaagaaattaatatgccctgggagataaatgtcaaatttctcaacatttgagttctggcttcatgccatgaataaaataaaaaaacagcaaacaagacagcaggtagaggagttgagattagaatgtgtacgactttgatactagaatctttgctccattattttgggttttctctctttagtattttggatattgcatttatttt

SEQ ID NO: 984 - DNA, 501 bp, Bos sp.
ctctacccagtgaccacatcctttacctcagcaaaccccttctttatttctctagactgtgctctacagtggcactaactccatcatgctctgttctgttccttattagtgtccatgagctttttgtttactttaataacatcaacacagagagatgggcctattgctggggaactaaatgtgattttagtagcttttattgaaaccgttaactctacctggtaaattgctactgtattctttattcagtycttgtagtcacaaggatattaaaattccatactttaatttgtctctttctctgaggtactggtgatctgtttcatgtccccttgaattaattgatatcctgtgatttttgtctatgttatcccctccacttagctcaaagtctgacagcgagttggtgttcattgaaaatgcactgtgctgtgggtcattgagaatacagagatttgtaagacatttgagaggtgaatttactgtttaggtggcagagta

SEQ ID NO: 985 - DNA, 501 bp, Bos sp.
aaagcaatcacagctttgaagatctcataagagcatgattagaaaatgataagatttaggttttttactcttcctaaaaaaattcttaagacctgcggtggactcataccataagtctcagcattataatcagtcatttgtacattttaattgtctaggaactttggaactttagtagttagaatccaagtttgaggaactatccctccctgcttttcctcagttgacattagaggtcatcttctttctcmaagttttaacgtgattttatcttcaggctgcacttttctttgttttactcttttgaagaacttcctcacccttgcttttcccccagatattaaggaccttgttaccaatgtctatcaaaaagcaatgcctctattcctttcctatttactttcaaagttcagtgtgtaggacttgtaacaacttttaactggatatgctatcatacattttatatgttaataaatggcttgcatcatccatggcagaagc

SEQ ID NO: 986 - DNA, 501 bp, Bos sp.
ccaggatcctttctacctttgaagttgtttgtggattcacagtgctatgtttaagatgtgtcagatcttatacaaaatttctatttctatttttatctctataattcaaaaataaatgagactcagaccctgtatctctctcactttgtcatttttctctcaaagatcttataggaaaacagataggatagcatccattttaagactaagatgagctacaaagagaggattccagtatccaaaataccaaratagcattactacaaattgagaaaacacaatctgttgttttgtgccagcctccatcctgctcaagcaagcgatattcatcgatggtagagaatgtgccctctggcatggcttctctgagtaaactcagaaagtgtagttgtcataagaaaattgcctgacatcattcagagtgaagcaaagtgagagacatgggataaatctaagttgtttatttgaattgcaggtatgtatcatccactatgccaaaga

SEQ ID NO: 987 - DNA, 501 bp, Bos sp.
aaaaaacttagttcaaataacatctaaagtagaaatacagattttcttttctctcatggctgaagccaattaattaaattcatatttaaattaatattacatgtgaagactttttcctgctaacagtaccacccctctggtcttgtgaaacgctggtgcatggtttgatgcctaccagaattaacaagcttacaggcaggtaaagacaggtaacagaacaccagagatacccaaataaggcaggaaatacygtccattttggttttagaaaataaatatttaatctaatcatcaaatacaagttgaattgttaggttctagccacctgtgtggatcacaataaactgtggaaaattctgaaagagacgggaataccagaccacctgacctgcctcctgagatatctttatgcaggtcaggaagcaacagttagaaccggacatggaacaacagactggttccaaataggaaaaggagtatgtcaaggctgtatattgacac

SEQ ID NO: 988 - DNA, 501 bp, Bos sp.
gtaaaaaattagatagtggtgagttttgagtatgaattgcctttgtttttaaattagttctaagtttataagacaagttttatttttttattttatttatttgccacatggcttgtgggtttgcaggatcttagttccctgaccagggattgaacctgtgccctcagcagtgaaaacatggagtcctaacaactggaccaccagggaattccctatatgacttaatttttaataatatttgtagctaacarttgacatgcagagttcctgaagatttaagcatgggctcccatgaaccagtatgaaccagctccagcacagcacaggttttgttttacttttggaggggaggtttgattgtgtctacatgctaataggaaggagccaagtggataatgaaagatgagttatatatgagaaaaaggggagagctggtgatcaggggctcctggcacctggatgcagattggatccacaatggaaaggaaagtggtggccatt

SEQ ID NO: 989 - DNA, 501 bp, Bos sp.
tgaaaattatttttcaaattttagtaaatcacgtttttagtatttaaggaaattttcaaaagtaactttaatttttaaataatatttggtcaaacttgccaatgaactgtattcttttttaatcatctttttagaaccttagaaaggatttaatttagcttagttttgtatgactttcttagaattttttctgtgttacatggtatttaattttttattattgttacgttcaggacatatggaaaattatyatctcttttctaagttgaaaccaaaagaatttttagcttcttaatttaaaagtgttctcgggtgtataacaagcttattgtaagtctgaactctttcctatttacctgtcattagaagaaaaaaaagaaaaaagtgatagcccaaaacgctcaaattttagtgtacatgggattaaccagaaatttgttaaaatgaagattctgatttagtgggtctggggtgcagcctagggttctgaatttctaataa

SEQ ID NO: 990 - DNA, 501 bp, Bos sp.
gatatgatgcagtcacttgcaacagactgatgctgtcctaggactgaccagagaagccagggaaaatacgaaatttcttctgtttggaggccacagagcacagctgagcaaacagagcagctctgggctggatttcggaggaacagaactgcagattggcgagcaggcattctagaattgttctgccttcagggaacaggccagctcttggcactgaccaaggtagaaggaaaagaaagctagagagtcaytgttttttaattaagttttgttggagtattattgacttacaatgttgtgttagttcctgttgtatagcaaagtgaatcagttatacatgaacatatattcactcttttttagattcttttcccatatagttcattacagagtattgagtagagttcccagtaggttcttgttatgagttttacatatagtaatgcatatatgtaaatcccaatctaccaatttatccctccccgcccccaccccctttag

SEQ ID NO: 991 - DNA, 501 bp, Bos sp.
agactattccaccagcatgagtttcatgagtgcatcaataagacaggaggtaaatacaaatggagtgacttctaaaacgttatggtccaatagaactatgttattccagagggataagatatttaaatagtataattctggatatgcaagtaatacagggcaaaatgtgttagctgttgaatagaactgacatccttgattccaccaccaatcacctatctgatctcaagcaatttattaaacagtcaacytcattttcttcatcagaaaaacaaagttaatgtaaacataccttgaagttttttatggagagctaaaaaagatatgtaacattttcaacaaaatggcttttcatattgcaggtatttgataatttttaatctcttctccatctctccctcttttttcgtttatggatcaactgtgtcaaagaaaataaaaacacatggattttcaggtttaagctacaaattgtcagataacatcttccatgggagactt

SEQ ID NO: 992 - DNA, 501 bp, Bos sp.; identical to SEQ ID NO: 446

SEQ ID NO: 993 - DNA, 501 bp, Bos sp.
gtcctcaacaatacttgttgtttcttgtccttttgataagagccattctgacaggtgtgaagtggtgtctcattgtggttttgatttcatttccctgatgattagtgatgtcgagtacttttcagatgcctattggctatctacttgtcttccttggagaaatgtctattcatatcatctccccatttttaattgggttgtctgtttttattttattcagttgtatgaattctttagatattttgaatagmagggccttatcagatatatcatttgcaaatatcttctccattcagtaagctgattgttttgttttgttgatggtttccttcaccatgcaaaagcttttcagttgtagtacaagacttttttgatacatttttatttcattgctgcaggatgggtctgcatacccagtgaagcaattgtgaggcagattttggtcagcaggatactatttactacctatccatcatctgccttgattttttaaaagtgaat

SEQ ID NO: 994 - DNA, 501 bp, Bos sp.
tctgcccatggaattctccaggaaatgatactgcagtgagttgccattcccttctccagggtatcttcccaccccagggattgaacctgggtcttctgcattgcaggcaggttctttaccatctgagccttgaaattatttacattgctgtttaaagttctattaagttctgttaattaccaagtgcttggtcatctgtggatctgtttctagtaaattttatttcttgaataggcacattttcctgcttmtttgcattattagtaatattttattatgtggtagacattgtggataatttgtaggaatttggattatgccatcttcctttcaacagtattgaattttatcctttgttcaaatggaactgtttgtgcaaacttagtccagtacagcccattggactggctgcctgttttaaaaaaattaagttttattggaacttactccttgcccgtctgtttacaaattatctatggctgcctctgcactacaatagta

SEQ ID NO: 995 - DNA, 501 bp, Bos sp.
aagatgaatcattagagtttactttaggtttttggtaactgtaaagaatacaggtcttttcaaggaccaagaaactggatatgttagtatggaactttatgtttttaaagcaaatatgtattcaggctggcagtatattcatgctgataaaggtggtaaaaataagaaaacagaaatcatacctttttagagcatactactactatatatatggaaattgcctaaaaggtaaaaatgtacatcttagattyccgaaggttttattttcaactagcaattaaacctaagtgtaaaagtgagccatgcagtaccttcacctctcagctactgtgaaaatgatatgaggggaacagaattctctttttttccctttaaatatgtaatgctcacaagtcatcatgtggaactcaaaatcacacacaaaggcaaatcatgaagaaatgttaaatatttcaaaagccctcagaggtgtgccagaaacgatgccgcttctacagcaca

SEQ ID NO: 996 - DNA, 501 bp, Bos sp.
ctgggtccctggtaaagttgagaagattgttcattatttcctatgcgtcttacatttaaaaattgacctcaaagaccaagtagtcatgccaaagctcatgaataaacatacaaaaaagttattttaatctgaatctacaatgtatagaaaactgagtcagacttctaagtaatacttggtataaaacttgttaaaaagcaataaaaactccattttttttttttgttatagcatgccaaagaactgaagaratcccatatatttttataactttcatatactttgctcctggatggccttctcttagaataatttttctttcttgtcttcctagcaaattccaaggtgttttgttttgttgctgttgttttttaacagctcaggtcaaatgcctactctgtatagaactttcccatttcaccaccagaactaactaacattcggataccacttagcttataactctcccttaatattgccacatagcattatatttttatg

SEQ ID NO: 997 - DNA, 501 bp, Bos sp.
atacagaggttcatttagattcacagtatttagtttttggcaagaagaaggtagtgtccataggcacttccttttgcgtcaccaagacacacatcatcatgcctgtttgtgtcttttgtgactttgggttaatcagtagattcagatattgtcagccatagtggaaaaggtttttaaaaaattggtaaaagaagttgacgagaactattatatggtaaataatataggctctgtgtgtgtgtgtgactgtrttttttaattttgttttggtaacttttacccctcttcattttgcctccttccataggatgacaataacctgttaaaacagcaacttaaagatttccagaatcaccttaatcatgtagctgatggtctgattcgtccagaagaagtggcagctcgtgtagatgaagtaaggagaaaattgaaatcaggagctggagagatgaggtaatggaaggtcaggaccgccaggtgtagagtgggctgagttgtgaa

SEQ ID NO: 998 - DNA, 501 bp, Bos sp.
aagtcagttggataacatttattataataactgaaaaagtaggatgtaatgttttatatttagtatatcaactatgtaaattatatatatagaaaagacaagagaggaatgacaaaataatagtggttgcctctgggaggtagcaatgttttttattgcatacttatctgaactttataattttcctactaacagcattaatttcttttagactaataaaaactatatttaaaacaacatagacttctcarttcaacaacatcatctcattattgccctcttgaaagtgaaaggtattttatgtttctgttggatggtggtggtaggaacatttcaggtgttctagagcagcattgtttttgattattttgctttctcacttgcaaaagcaaggctactgtgagtgattccttggttggttttgtgttttcttcctctgtccctactcttgaagcttatattgtgatttaaaagtttcactttctccagagttggttgcca

SEQ ID NO: 999 - DNA, 501 bp, Bos sp.
aaccaaaggtaagtacatgaaaacaaatatatagaaatatctgctcaaattaaaaataaagggaaaaggcaggtacacaaaggaaaaactacaaaacaaagtaactctgggaagctgacctctgatctaaagaaagttggtgagagcatttatgtttgaccagaagagaatctcactgcacagaattatttcaagggtacatgccacttgcacgttttaaaagaaagctttattataaaagccaataaatktatttatagttgaatgcttgagacttgcttgggatgcagacaggctatcttccagagaaagacaaatgcttaaagtgcagaattatcacactaattttaaaaaactatgaattaaaaccactaaatataactttcctaagttcatttctttttgtgtcttctttttgtcattaatatttaactttcagtggatcaagaaaattgtcactaccatttgttatctggattcaatggacctgaaaaataattt

SEQ ID NO: 1000 - DNA, 501 bp, Bos sp.
caaaattagagccatgggggagaaaaaagagagagagagaagataaagtgcagaggtcaacaaggagctgttttacttactgcttccctagctcaaattctgaaagtcatctcaaaggaatcattgtccttctgctttccaggcctctctttttcactatattttgacacacagaccagaacagagaacgcctggactgcagcaatttagaagcagtccatctatcatatatagtcagtatctggacagarttattaaatattttagtacaaactgctaatgtgactagtgttatagtaacaaagaaaataatgataacaatgttgttgttgctgctgatgatgatataaaaaagatacatgtcttaagaaagccataactctaaaggcattacctttaatagggaagaagaaattttatcatcaagccataaggcccaatataatgttaattttgatttttttctctgtgttaacttatttattttaactaccattttaa

SEQ ID NO: 1001 - DNA, 501 bp, Bos sp.
tgtaaaagaaggaaattcttttctcatttaagccacattgttttgtgcttttctgaacctaattctgatgtacagaatctagattaattgtggaccattacttttttttctttttgtttctggggattttctctatgtatgataatgatcgtataaacttgtcatctaaggaagagcaggagttgaggtgctcaagatgaacaggtaggtgcaggatgtataatttcccatttcaaaatgaaagaagagargcttggatataatttgttaattatatctggatggtgggagtcattgaatggggagaggattaaaaaaacgggagaaattacaactactgagtgtctttatcaggtagttacaaaacatacatatttttacttaatctttctagataactttgcattttataatgaagtaagtaactctttctcaatctcagcttcctcacctttaaacactgtggtgccctgaggttccatccctggccctctctagctt

SEQ ID NO: 1002 - DNA, 501 bp, Bos sp.
aagtaactctgggaagctgacctctgatctaaagaaagttggtgagagcatttatgtttgaccagaagagaatctcactgcacagaattatttcaagggtacatgccacttgcacgttttaaaagaaagctttattataaaagccaataaatgtatttatagttgaatgcttgagacttgcttgggatgcagacaggctatcttccagagaaagacaaatgcttaaagtgcagaattatcacactaatttwaaaaaactatgaattaaaaccactaaatataactttcctaagttcatttctttttgtgtcttctttttgtcattaatatttaactttcagtggatcaagaaaattgtcactaccatttgttatctggattcaatggacctgaaaaataattttgtcctttaataaataattcacagaggcaaaaataaaaagatagtaaaaaaacaactatattctaaattttaaaacaaatttaaacattacaaatttt

SEQ ID NO: 1003 - DNA, 501 bp, Bos sp.
ctaaatataactttcctaagttcatttctttttgtgtcttctttttgtcattaatatttaactttcagtggatcaagaaaattgtcactaccatttgttatctggattcaatggacctgaaaaataattttgtcctttaataaataattcacagaggcaaaaataaaaagatagtaaaaaaacaactatattctaaattttaaaacaaatttaaacattacaaattttttgtaacaagtaaattttggcayacaaacatcataaaaatgaataaagatgaaaacacctaattttagcaaaacagaatagtctaagtccttcctgcaaaacatttcctgatgaagtttctcctatttaataacaactggattaaatcacctactctctttgttctaggaaatatattgttcacacagatattctagaaaattcatctaaatattgtcatctgaacacttattgtctcattgtctaagattccacttatacaatccatttcac

SEQ ID NO: 1004 - DNA, 501 bp, Bos sp.
atatctcaacaatatttagttcatgaatgtggaatttttctctatttatttagttagatcttccttaatttcattcatcagaactttgtagttttctgcatatagatactatacatattttgtagatttatgcctaagtgttttattctttggggtactaatgtaaatggtattgtttttaacttcaagtgtttccattgctggtatgtgggaatgcaattcaaattgtaattacattagtcttagaaggkttttttttgttcatttgggtttttttggtggttgtggttcttgattttttgagattttcttcatagatgatcttatttcctgctaatgacatttcttccttcttaatttgtttacctttttcttgtcctattgcctaagctgggacctatagcaagatgttgaataggaggggtgagaaaggacatcgtgccttgttcctgatcctaggaagagttggacatgactgaagtgacttagcatgcacagttc

SEQ ID NO: 1005 - DNA, 501 bp, Bos sp.
aaaaaccaaggtaaccacaaatcaaaattatatagtagattcacaaaaataaataacaaaggaactcaagaataattcaggaggaaaccatcaaatcacaaaaggacaaacagaagaaatgaacaagaagaattacaaagtcaactagaaaataaggtttaaaatggcaattatatatttatcaagaattacttcaaatgtctttggatgaaatgctctgaacaaaagacatagagttacatattggattwaaaaaaaaaaaaaacaagaacctacaatatactacctatgaaggactcattttaggctgaaagacacgcatagattgaaagttgggggatggaaaaagatatttcatgcaaatagaatctgcaggaaaatagggttagcaatactcatatcagacaaagtaggcttcaaaacaaagtccataaagaaagacaaaaatgggatggggggacacatgtatacctgtgactgagtcatttcaatgtatggcaa

SEQ ID NO: 1006 - DNA, 501 bp, Bos sp.
agggagaaagtaaacaaattatagaggaacgacacaattcctcagtgcaagttggcagcatggattctacatgccaggcttattacagtctggtgagaaattgtagagcagcattatgcctggtcaagggtagcatgagcagcatgtaaaaggttgatattcagcccagattgaacttactattttatttaaaaataccattgatcacagcaagagtagatattcagagggttaatatataggattgtcaytttattttgctgaatttgaatatataccatctaccctatactgggcaagaacaaaaacagaacaaaacaaaaaatgaaagaatctagattacaaatcataagctctggatttgaatcccagatcttatattactaaggaaaatagatgggcaatgtaatccttcttgatatccagatctctgtgtttaataacgaaaatacagatgccatatcattgtgaagatgaaaaatgagacaatatacataaaac

SEQ ID NO: 1007 - DNA, 501 bp, Bos sp.
aatgtagcacttttatagcatcatcttttagggtttgaaatagctcaactggaatttcatcacctccactagctttgttcgtagtgatgcttcctaaggcccacttggcttcacattccaggatgtctggctctaggtgagtgatcacaccattgcagttttctgggttatgaagatcttttttgtatagttcttctaaactattttaagttttaagtaaaaacttaaatcaaattgatttcattcttaayaaagagataaggtatatgtacctccacacagaggcacataatgtgggtcagattaagcacgactgagctttggatataaaatgacttgtgctgctctggattactagccctgctctgtttaaggtagggaaggttttacctatgggcccatccttgcccagttcctcaaccaatcctgatcaggttatctagtcagttttacagctagagctaggttcagaatcaggtgtgtcctgggtgaatccaaatt

SEQ ID NO: 1008 - DNA, 501 bp, Bos sp.
ttattactatcattattttacatgtcaataatgatataataaaatgtaattttattactatataataatgaatgagataacataacagtaataaaacctgtttctatttcaaatatttttatcaacatacaattaagggaacccttgtcaattaactcattaacagatattaagtaactatatgttataggcagtgtttaagtcttgagttactcagtagaactgatctttaatatcatgggtatttcacrctgataaaagtaaccatacataaatagcaataaaacaaataagcaaaaaatagataagaaaatattggaaaaccataagagtgcttagaaatatactttacacagaagtgacaatgtgaactaatatctgcatgtggaaaaagatcaagttaggtaaatcttttgacactggataaatagttgactgaaaacactaatatatttctcaacttgtttagatttcaatattttggacaaacatgccaatgga

SEQ ID NO: 1009 - DNA, 501 bp, Bos sp.
ccagtactcttgcctggaaaatcccatggacagaggagcatggtaggctacagcccatggggtcgcaaagagtcggacacgactgagagacttcacttcctcacacatgtagtttgaaaatatacgaataaaaggtatatggctagattaaggaaaacctttgtcttatgtcatggagattgtatttcaattatgcttcctgaaatcaagactctcttttcagtttcagatttgtatttatttattttaaragctttactgaagtacaattgaaaagccacagaagtctacccattttaagtgtacaattcaatgatttgtagtaaattaatagaattaatgttgtgcaaccatcaacacagttcagttatagaacatttcaatcactccccaaatttctatcagcctgtttgcgagtaatccttccttctaccccagacccaggcagccaccagtgtgctttctgtctctatagataatttgtcttttctggacatttca

SEQ ID NO: 1010 - DNA, 501 bp, Bos sp.
aacaatttgaatttgcattttttttaactctagcagaagattagaaaatcatttaaatcagatggccatatcctagtttagatacccaggtgaaaataaaccctatcttctcaatggagtaaatcaggcttaaaatgtcaggatatatttttttatcccaatcaagtatttcaatcatcctgctcatcacatctaccactatgcaaatgaactactcatttctctgctttcatagctccttatataaaaamtgcttatgttcattttattattttttttaaatactgtcatgtcttttcttctgcctgtaattatttgcaccataactcatggtgatacagctcttatttcagcagatattgaatatggatatttctctttcagatactctaccctgatgcttccactgtgggttctgcttctctatcttctcgaactttcagtgttagtggttatgatattgattgtgttcttgtcttccagtaccacctccagatcatt

SEQ ID NO: 1011 - DNA, 501 bp, Bos sp.
gctttggtatcatagttgggaaagcattcctttctttttatttatctgcaaatgtctctatagaattcccattatttcctcctacaaaatgcttagcagaattcaccaaaaaagccatatggagagagagttttctttgtgggaaagtatttcactataattctttgaaaatgtgtttacccatttgtctcctatataaagatatcatggaatcagtgctgaatataaggaattaaaaacaattatttttytgaaatacaggaccatgaacagaatgctgctaagctggtggactgaaaggaaaccatatctaggcccaggctattcccctgtcctgagaacacactcacttccttcatgagcaactgtcacagaaccaccttccaagagtcctcataaccaaactttcactaaattcaactgcctagaaaataagtctccttagtctttaaattcaagtttgaactcttttttttacccttctccttgtattttcctcta

SEQ ID NO: 1012 - DNA, 501 bp, Bos sp.
catagggctgcaaccacatagctggtggcatgctctgctcccagcacagccaggaggagggacagttagtctctgaggaagttttctctcctggacacgtccactcccagtctgacagctgcctcccatcttccgacttctctgacactccaccacctgcagcttcccaactctcaaagtttcttttttggtttgcttgttttgttttttccatctttttttctattttttattttctttttaattggagsaaaactgctttacaatattgtgttagtttctgccatccatcaacatgaatcagccacaggttatacatgtgccccctccctcttaaacctccctcgcacctccgaccccactgtacccctctcaggttgtcacagaacaccaggtttgaactccctgcatcacacagcaaactcccactggctagctattttaaatatggtaatgtacatgtttcaatgtcactctttcaattcgtcccaccctctcctt

SEQ ID NO: 1013 - DNA, 501 bp, Bos sp.; identical to SEQ ID NO: 829

SEQ ID NO: 1014 - DNA, 501 bp, Bos sp.
aataaagataaaagcagtatgtaatcaactataaataagaaaaatggccgaactaataaataaaccaaacaccaaatctctgagcaaaccaataaaccagaaatgcagaagtcgaaagcacaaattcataaaataataaatgatggaggaaaaatcatgatatttggaggaaattaaaagattgacaagaggctatgctgttcaactatgcaaaagtaattgaagacccagtgaaaaaaggaatatttttwaaaattttcaatacattaaattaattccaacacaaacagaatatttatagaccattcactatggaaaaactgagttgtgaaaatgctaatcctatgtcaaaaatctaactcagagattttctcaggaaagtgttagcaaaacttttaacagattaaaacactacaaatctatttaaaatgctcaataacataaagaaaaccaaccaagcctcttttatgaagctaatcttacaataacataaaaaaccaa

SEQ ID NO: 1015 - DNA, 501 bp, Bos sp.
acatcttaggatctttaagccctgtccttatatggatacagaaactgaatctttaaaaggtgaaaagaattgcctacagtcacagaagttgaaagcaggcaggtctagaaccagggcttcttagttccaacaccctgatttttcaaatacattatagttggaaattaattccaactatattattccaatacatatataaattaatataaatatagaaattaatagaaatataattccaatacattatagamattaattccaactgttaccttatttttattagctgtcctgggttttccttgctgcctaggcttttctctagttgtggagagtggagagtggggactactctctggtctcagtgcatggacttctcattgtggtgccttctcttgttgcacggcatgggttctagggtgcttgggcttcagtagctgcagcatgtgagctcatggggctcccaggttctagagcacaggctcaacttttgtggctgatggg

SEQ ID NO: 1016 - DNA, 501 bp, Bos sp.
ctgaattaatcacatgatttccatatttacttcatctatgttgattaaaatagttaataaaaataatcatggccactgcctattgagcactggataccaggcactacattgaagtacgttacatgtagtaacctcagttaccttcacatgaaccttctaaggttggacttaagtttaaggacttttaaagccacacagtttttcaaacagatttcttctctacagtatattgtggaaacatgttaaaattwaaaaagtatgtattttacaatcagaatttaaatgctactaaatttattattttggagaaggcaatggcaccccactccagtactcttgcctggaaaatcccatggatggaggagcctggtgggctgcagtccatggggtcgtgaagagtcggacacgactgagagacttcacttatgtatacaatatatagtcatctgtctcagtattttctttttaaatggaaaatcatagaaattaaaaagagggaca

SEQ ID NO: 1017 - DNA, 501 bp, Bos sp.
gtgagtctcagtgaactccgggaattggtgatggacagggaggcctggcgtgctgtgattcatggggtcgcaaagagtcggacacaactgagcaactgaactgaactgaatttttaacaaacacagcttctagatacatctagtctgttcagaaaagggaacagtatcctgtcaacttttataattgctgttcaaactgtgattagttttatattcaaactcatctctaataatttgtatgtaattactcyggttatttatggtcaaatttttacatacatattgtatcaaatgtctcattattttaattttcacatctaggagatggtataggtgtcagaactgtgtaaaactttttgaaatctctcctgtttctcaaaagtccaaattccgaatatggaggtgaaaacttcaattcatacagatcaacatcacaaaaacaatgttatgagctgtttatatttatcttttcttcagattattttttaaatttagttgtgg

SEQ ID NO: 1018 - DNA, 501 bp, Bos sp.
gcctgccaatgcagaggacatggtcgtgatctttggtccgggaagattccacattccatcatggggcaactactgaagccctcgagttttagagtctgtgttctgcaataaaagacaactcaatgagaagccctcacacctcaactaaagagtagtccccgtccgtcacaactagagaaatcccgtgagcagcaacaaagacccagcacagccaaaaataaaaataagtaaataaaatttttaaaaaattwtggggtagttacctcgatttgtctacctcaaatacaggttatgcatttttggtaggaataccacattatgctatgtccttttcaagctatcatatcaggagctacatgatgtcaattccactcataacttgtgaagttaattttgatcatttggttatggtggtgtccaccaaatctctctattgcaaacttttttttatcttgtaattgataattaatttgtgggggttattttgaatctatgtaaata

SEQ ID NO: 1019 - DNA, 501 bp, Bos sp.
actcaaataaattctcacacaagtaggtaaagagagattctaagatatttatcacaacattatgtgtagcagctgcaaggtggaggcaatctgaatgtcggtctctaaaagaaaagaaagtaaataaaatgtctggaagaacatataaatttacacagcaaattaaggtaacatatagatgcctaagttccaacacaaatgaatatcaaaaacattgtgcttagtggaaaagaaaattagatatattttayaataacatttagaaaaatgaaatatccacccacaagacacacatattttgtaagaacacacacactgggaggaaaaaactacattaaacacaataatatggctgttgttccagttgtctttgttgaataaccaaccactctaaaacttagcagctaaatacaatgatcttccgttttgctcacgtgtctgtgagtaaggatctcaggagcagcttgaataggcaatacctgtgcctgcttggtatacaca

SEQ ID NO: 1020 - DNA, 501 bp, Bos sp.
ttaacgtctcatagaatgcataattaatctaagtctaaaatatgtaaacttagaaattctgaatcaattgatcattgatattactagaaaatgtttaattatgtaagcaattctttgttaactgaaaggatttcactttttaaaaatatctatatctttttcttccataattttaagcaaaattttcataacaaataatttatttttgtcctctatccatataattataatattttattattttgaatgarttttgaaggttaaacatttcaatgaaaattaaacaactggatctgcacacagcgaagctattgcccgaggtatctggtgtactgttacaaggaagttttatgatatgtattgtttatctcaacctacatcttaccatatcttagatgtctgctaactaagattatttaacttagtctacaatctacccttctgcttaggaaacaataattagtgtctttctgaaacagattcatattaagtgtccccaaa

SEQ ID NO: 1021 - DNA, 101 bp, Bos sp.
gtttttggcttcagagctgcatacttgtagaatttcacttgggatttcccrtaacggttacaaacctggacccgcaggaggactgaggctctgactcaggc

SEQ ID NO: 1022 - DNA, 81 bp, Bos sp.
cactggaattcaaagtataacagttatgcaactgctctgaagcatgccgayggtatagctgtggttggggtttttctgaag

SEQ ID NO: 1023 - DNA, 101 bp, Bos sp.
attctggatatcatcttccgggacttctgcgtgggcaagtgaggggacagyggaagctcagacccaggctggaggagcacccggaagccttggggtatctg

SEQ ID NO: 1024 - DNA, 101 bp, Bos sp.
tttctatttctgtagagtttacatgatttcccactgcttacactttagaaygtttattttatgggggctgagggattaaaagagtgtgaatgaacaggtaa

SEQ ID NO: 1025 - DNA, 101 bp, Bos sp.
gtatgtttgtgtaacacgcagatgtgtgttatatttgaaagtgatgactcytgtgaaatgctaggaatgtatcgtgtaatttctaaaacctgtgatgccgt

SEQ ID NO: 1026 - DNA, 501 bp, Bos sp.
ctacgtttctcttcaacgccgtactggaatttctagccagggcaaaaagacataaacgagaggagagagaagtgagaggagaggaggagagggagccaaaatagtacatactgtgtgattcagtgcctgtgaactctggaagatgcaaactaacttatgctgacagaaagcacgttagtggtggcatagggagggagagcaggagggaaggattaaaactgggacaagatgggggacttcccatcatgcargaattctccgggcaatgcaggggactcaggtttgatccctggttggatcagtaccagctcactaaatgaaaaaaggaccatacttagtggtttgcatgtttagaaagctgtgacaaacctgaaaagtgtattaaaaagcagagacatcactttgccaacaaaagtcccaaagctgtggtttttccactagtcatgtatggatgtgagagttggaccataaagaaggctgagtgcagaagaactgctcctt

SEQ ID NO: 1027 - DNA, 501 bp, Bos sp.
gaatccttcatctttgcgaatggagaaaccagatgaaagaggagtagctttgactcagtacccataatattaggactgggactcattccagtttccccaccttccttctccaggactccgaacgtcaaggaattctccaacaacaaacaacaaagcacttcaaaccatgatagtatttatctggaatttcctaccagtttgttctttcagatgccctctcacacactctctcttgctttctttgcttatcmatttatttatttgtaatttttcatctttgtttcctttcctaatattttttttcctactcccttcaatatgtccttcaaaactcagctcagctaagttccatgaagtaggtggaagggctggagtttgacttattagtctttattcttcaattccctataatggtattaaccatccacatcctcgcaatggcctcagcaccactggagtgtacactccattctgtgactatgggccttggtttgtcatcaa

SEQ ID NO: 1028 - DNA, 501 bp, Bos sp.
ctttattcattgtactgcctagatgaataacaaactatcaagacctccacagaacagaaatgatagttgaggccatccccctagaattctgtgcaagtctgagagatttaaccttgaactggttcaaagattgtgctgggaaaggccaagcaggagagcgctttcatttccaaagatgtgagagatgtggttctatcatgaattgtggattatgaatgatattttttccagtcacattttgggatttgctrcctttgtatttgtcaacaggggcaaaaagaaataggatattctcagaatgattgacccaaaacccttctatcccttcaaaagagtagacttggcaacatgaacttgatctcactcatttgcgtagggaactaatgatttgactctctaccccctacccctacccaatttcaagtcttggccttcattccaggggccaaaagctttcttctctttcatggaataatcaagaccctaaccttacactacatg

SEQ ID NO: 1029 - DNA, 501 bp, Bos sp.
aacatgcatgaacctacagagtattttgctaagtgaagcaagtcagacaaaaagttatttttttttattcatctgttaaacattcaggacctacttgccaaatatggcaaactagtcacccaaaatttcttcctgaatatcactaaaagcaaatttcctaaacttatataatgaaatatcacacaatactcaatgtttacatagataaaactcctggcactgaaaaaatttatattaggaatctgaaatgwctgggtaacatagaaatattagtgaaaacaaaagataacaaaattttgcaggcaataacatatcttgaattcatttaaggatcatagttccattctttatcaatgtattactggacatacacaaaagcaaaggaaacttggattatacttgattgatgcaaataatgagtctaatttttcttgctactttaggtagtttattcgattctctcttcactttgatggacttatcctaacccagtgtgacttt

SEQ ID NO: 1030 - DNA, 501 bp, Bos sp.; identical to SEQ ID NO: 701

SEQ ID NO: 1031 - DNA, 101 bp, Bos sp.
ctgtgccattgagtgccaccaatccctgatttggatggtgggggaggagaytgggtagatatttcacatatttgtgaaatgttttatcactaagtttgcat

SEQ ID NO: 1032 - DNA, 101 bp, Bos sp.
ggtcttttgaacttgacagaagcccaggtgactacagggccccaggaatcygaaacccatctgctttcttaaaaaggtatctttgccttgcccccatggtg

SEQ ID NO: 1033 - DNA, 501 bp, Bos sp.
ggtctgtctcctttcccagttgtcagtatattaaactcacaggtgtttgcttcacacccacaaaggagtcagtcactcttttctctgaaatgcaagaccttcctaacccattgtgcagtcttcccgtttttttcccttgttgaggcgtaaggtatatagagtaaaattgcacagtccagaagcaagcggtttgacaagttttgacaactgtcgacacctgtgtaaccccggtggcatcaagatagaggacrcttccagaatatttccgctttcccagacggccccctcatgctcctttccagtaagtcctgtcctcagagcaactgctgtgctgacgtctgtcaccatagattagttttgcctgtttttaagcctgacagcaatcatttttgcacttttgactgagacaaggttttaagaaatagttccctttgttggagacacagaactccaggatgatgaaaagaggcagttgagcctgggtcgcagtgaggaggagac

SEQ ID NO: 1034 - DNA, 501 bp, Bos sp.
gatcatcttaatcagtaggacttgtaaaaatctatacggtgaacttattccactcaagtatcaccagtaccatctggctttgaactcctaattcactcatctttatggggagcaactcctgactgctatggttttagggtctcttcctcaatagtgccgtttccaaggggaatctcaagcctttacagaggtagcttagcaaagcaggggaaggctctgtgctgggtgaagaatcagcctcactaattctycaacaacgtttaaaccaggaaatattttaagcttaacccagtgctatctgcaaagcagtgatatatcaacacagaatgttcttttctatcttgattggacatgttgaaaacattttcgtcggtccactcatgtgcgtatgtgtatgtatgtgtgtgtttataaaatgcatatatgtgtataagatccaggtgcctatgcacacatggtgtgtttagttcttacagcagacaactaatttgaactctttgg

SEQ ID NO: 1035 - DNA, 501 bp, Bos sp.
  misc_feature (401)..(501): Nucleotides uncertain from position 401 to 501
ctatgagtaatatcatcattaacagtgaggtacatggagcttattttgaagctataaaagaggatgacaaaaagcatatatatatggaaacttggagccagagaaaatcagatggtttttaacaagctatagcagaagaaagaccacatttttgtccccttaaaccaagttttaatgaagaaaagattctgttatatatgatttccagtggtttaatatggtggattgagagactcattgtcatgcccttkagaaatgaaaataactgggtcttaattttttgctctaacattaattgccagacatcaagccactcaaggatgggctatctcatatagactatctgttttctaaaatttaaatctgcataagagactctgaggccaacaagcacacaacgnnnnnnnnnnnnnnnnnnnnnnnnnnnnnnnnnnnnnnnnnnnnnnnnnnnnnnnnnnnnnnnnnnnnnnnnnnnnnnnnnnnnnnnnnnnnnnnnnnnnn

SEQ ID NO: 1036 - DNA, 501 bp, Bos sp.
agatcagagaacaggaagcaaaatttggtccagttcataaagtacacaacacaattaataaaactgccaaatcaaatttgttgtgagaaaacaaaatccttcagacagggactatgtctgaaccaaaacaaaacaatttttaaaaccacacattttgttagttctattcaattaacgcattagacaacatttttaagagcacaagatttaatttgatcacaaaatttccatattattcccaaaatttatgkaaaaaaagccattccatttacgttacttttaaaagtaaagaagtttctctttaattgcacttaacattttgatttctaattaatttcctgttctggtccttaagaaaaaaatgctataatgatatcaagaagttttagaatggcatatttactactaggaaatttctaaatgtcttttcatttttagatgaatcactactgattggattttaaaattacaaaagatggttctattgtattatgggttttc

SEQ ID NO: 1037 - DNA, 501 bp, Bos sp.
agaactctcgggaaaacccaacaccttttcccaggagcacgattatccccaagaaccactctgcggtagaccctgtatcctgcctttgattaagaggtggttgatctacctggcctaccataccacatatatcccggacttcctctgaaaatgcaactccaacatatgcaaacaatgcttcccatgtccaattctaaaataattttaacttcttagttgacttactatttccatagacttttcatcaatayaatgttaatgtaatcagataataggtactcactcaaattgagaaccttaaattatttagtgatttggtaggcatagaaaatgacacataattgctttgaattgtggatatgggaatcaatggactcaacatttactaacgattccaagtataagatcaaaacagaagataactacttataaatggacactggagagatggaaaaaagggataacggtgattttgctgcttttaaatcatataccataaaa

SEQ ID NO: 1038 - DNA, 501 bp, Bos sp.
catgaatcacacagagttttaagataggtgctttatagattgaattattttaatatctggtgaacttagtcctttccctccctcttcgtaaattcttcaggattgtcaggttttacagttcactggtgggtgtctttaacctgactggcaagacaggtgttagtcattaactttctaccagctctaagcatggagctatgatgatgccgatctatcttgaaattctgagtctttttgttgtattttttaaytaaattccaaaaaataaatttgtaaatcaagaattctgctaatttctaatttcattcattgaccattgaagtagagggtatgttcttgcaaattccttatttcctggatccttaacctggtacagagaaataggctttatctttatcattttatgttatgaaaacatatctacaatttatttttgttcttaatacatttttatagtgatcaagcatatttctgcttagaatttatgccattgcttaacat

SEQ ID NO: 1039 - DNA, 501 bp, Bos sp.
atttgcatgagagccgaaaccgtgtctactgctgtattctcaatacctaaaatagctcctggcacagagtgttcaacaaacaattattgagttataaataaatatatttgtatatatttttcctttcctttttatgtaaattttgtttctctaatgggattgagagacttgaggcagtgagagtatcttatgttctttgtatatctcctcatacacttataattgtaatgaaagtgggatctggctgctcyctgctcaaacaccaatcaaaaggccaggttggtgaaaaggaaagtttgctttattttgatgccggcaacctggggggaatggcagacatctgtccaaaggccaactctcatacacatatccccaccagcaatcagggggtatgcacttttataaacagagtgaggggataacatgcagaaacagcgcagtcatctctgacgtcatccagaaactggtcgtgcagtgactcatcatcaccatcttgattgt

SEQ ID NO: 1040 - DNA, 501 bp, Bos sp.
taaagacaaatctcttgacatattagtagtcagggtgaaaagggaaacaattcacagaactctcgggaaaacccaacaccttttcccaggagcacgattatccccaagaaccactctgcggtagaccctgtatcctgcctttgattaagaggtggttgatctacctggcctaccataccacatatatcccggacttcctctgaaaatgcaactccaacatatgcaaacaatgcttcccatgtccaattctraaataattttaacttcttagttgacttactatttccatagacttttcatcaatacaatgttaatgtaatcagataataggtactcactcaaattgagaaccttaaattatttagtgatttggtaggcatagaaaatgacacataattgctttgaattgtggatatgggaatcaatggactcaacatttactaacgattccaagtataagatcaaaacagaagataactacttataaatggacactggaga

SEQ ID NO: 1041 - DNA, 501 bp, Bos sp.
attgagtctttaggaagctgatcgtgttcaccttgttctgcctggtctgaatcttaaattatatacaaattaatggtagttattatgattattcttttttcaaattgtattccttctctcttactactcttgttattatttagttataatgtcaaaatacattttgtttcatcttagagtaaaagcatattttcctgtaaaccatactggaatctttcatggaatgatgtggagtataaatatagacatayagacagaaatttatgttgtatatactgtgcatctctgctgtgctggcagaatgacagctagtagaaccagcaggtatattcttctcttcaataggaggacattgtaagacaaagcacaatcctctgtttttcaccaagagaggataggcatatattattcagttatggaagaataagtttaatccaaaagttaagcaatataggtaatgaataacaagacagtttcctgataccttgttgtctgtatagc

SEQ ID NO: 1042 - DNA, 501 bp, Bos sp.
acataactgagtcaggacttcctcagaggaccactacccacatgcagcaccccttaagggcctgccttacagtgatcctcgggttcctgctgaaccagtgtgacgctgtctgccgtgctcctgcagcggtccacctcctctcctttctctctgatgagacgtctaagactatttcccactcttggccactgtgagaacgcctgctccttagcgttgctgtctcacctgaagctaactctacctgctctggrcttacgctttcctcctcctcccattcttgtgtattcctgcctctgcccttcccctctgactcccatgcttaatatgtgaccataccctcaaagacacactctttctcttctcagcagtcagtggcacggaacatgaactaccttgttctattcattctaagactcactttttcttcactttttaacatctctgaaatagagatgcatcccaccataattgatgttttttagtctaccaaatacagtgatt

SEQ ID NO: 1043 - DNA, 501 bp, Bos sp.
ccagaaactattccctcacatcactttgtttatttgctttgtatcatttgtcttgcaccattagaaagaaatttgcatgagagccgaaaccgtgtctactgctgtattctcaatacctaaaatagctcctggcacagagtgttcaacaaacaattattgagttataaataaatatatttgtatatatttttcctttcctttttatgtaaattttgtttctctaatgggattgagagacttgaggcagtgakagtatcttatgttctttgtatatctcctcatacacttataattgtaatgaaagtgggatctggctgctccctgctcaaacaccaatcaaaaggccaggttggtgaaaaggaaagtttgctttattttgatgccggcaacctggggggaatggcagacatctgtccaaaggccaactctcatacacatatccccaccagcaatcagggggtatgcacttttataaacagagtgaggggataacatgcagaa

SEQ ID NO: 1044 - DNA, 501 bp, Bos sp.
atgtggcagagtttgaagctggcagtcgtcagccatttggtgggaggccgtggatccagaggaaacaatgaggatggagaaaactgaaagggaatttttaaagagggagacatttttgttccagcagttttttacacattattttgaccttctctttcttgccacttagtgaggaagatagctaattaaatgtttgtgttattggaggagttctttaatgcttataaatgtaagcatttgtaatctaaacsgatttgtaatctaaacagatgtctgttaactattttgtgcctccaaacaaaggagaatctttgtgaatgaatgggagtgggggctggtggggtgggacggggaagaaaactgacccaaagcctaaactgagagtcttggggatggctgtgatgatgtggctgagtgaagggaagcctaggtgactgggtggggggattggagacccagtaggaggaaaaaaaatagtaagagactaaagcaggatccagg

SEQ ID NO: 1045 - DNA, 501 bp, Bos sp.
taaattccaaaaaataaatttgtaaatcaagaattctgctaatttctaatttcattcattgaccattgaagtagagggtatgttcttgcaaattccttatttcctggatccttaacctggtacagagaaataggctttatctttatcattttatgttatgaaaacatatctacaatttatttttgttcttaatacatttttatagtgatcaagcatatttctgcttagaatttatgccattgcttaacatragaattttttttggtcagctttaaaatatacatctagatatcagaaccttaactgataaaatataacctacagttatatcatggaagtagtcatcaagttctttaacagacaatgacagaccatattccagatagataatttggataatcagtattcctctagattaaaaacaattctggaaaagcactaataattaataaagtgttaaaaaattaaattcctaaatttttcaaaagtggttgtgcagac

SEQ ID NO: 1046 - DNA, 501 bp, Bos sp.
taggccttcctagcaggaagaaatgtacccaagaaatgtggctccacttcagggattcataagcagggaagaattactctgacttctctctttgtgatctgatctcacattggccaagcctaaccagaaaccagttgatacagtctatagtgtacaggggtcattctctcagagcaggacaggactagcatatgaaaggaaataatttactgaagaataatactgtaacaatttcccttctgaaaaccatycggtgaccatcccagagaatgtgaccaaaaaaaaaaaaaaaaaagcccagcaaaagcacggaataatgaaatttcacaaccccattaataaagaaaagatcttaaaagcttccacagaggaaaaaacagatcttatataaaggatcagaaatcacaatggtgctaggttggatcaacactgaatgctgtatgacaatggagctatgtcttcaactttctgaggaaaaattctttccaagccaaatcttca

SEQ ID NO: 1047 - DNA, 501 bp, Bos sp.
ccctcttccaacaacccttctttaaggcaaccaccagtctgctctctatgtcagtgagtctgtttcattttcacagatagatttatttgtgtcatatgtagattccacatgtaagtgatatcatatagtatttgtctttctctttctgacttcacttaagtttgataatctctaggttcatccatgttcctgcaaatggcattattttgttctttttaacggctgaataatgttccactatatatatgcgmcacatcattgggcttcccaaggactcagtgacaaagaatctgcttgccaatacaggagatgaaagttccatccctggtttgggaagataccctggagaaggaaatggcaacctactccagtattcttccctgggaaatcccatggacagaggaggctggtgggttgcagtccatggggttgcagaagagttggaaatgacttagcaactaaataataacaacagacacatctttatccattcatcagttg

SEQ ID NO: 1048 - DNA, 501 bp, Bos sp.
cacacacgcacgtgcatacacacccacacacacatgtgctgcctgctgccctcccttccgggagcttcacagcagcctaaaatgggtccagtcttaccataaagaagtaaatgtcattgcatacaatctagaacacctatgtgatcatcttctgccctagtaacacatttgaccatcctgcagaattcaaagtaaatgcagatctcacccacacctcccccaaatgcaaagacgagacccaggagttgagktgtttgcccaagctccctcagttaagacagcggttcctggttctgaatctgacaccagctgactccaggctccttcgtctgtttattaaagcatcccgcgtcatttacgttcatgttgattctcgctgcacctgacagaaaaatcatttctctgctggcaaggcgcttcagagagacccgagaacacccatcccaggcttccacggcgatctgcccagcagctgtctttgccacatctcggatagccgat

SEQ ID NO: 1049 - DNA, 101 bp, Bos sp.
ggttctctagggcccctagaaattgggtcttgggctggtcagtacctggcrgccatggataatgcctgccttcccagtttatgtggccatgggatcccaag

SEQ ID NO: 1050 - DNA, 501 bp, Bos sp.
cacagcagcctaaaatgggtccagtcttaccataaagaagtaaatgtcattgcatacaatctagaacacctatgtgatcatcttctgccctagtaacacatttgaccatcctgcagaattcaaagtaaatgcagatctcacccacacctcccccaaatgcaaagacgagacccaggagttgaggtgtttgcccaagctccctcagttaagacagcggttcctggttctgaatctgacaccagctgactccmggctccttcgtctgtttattaaagcatcccgcgtcatttacgttcatgttgattctcgctgcacctgacagaaaaatcatttctctgctggcaaggcgcttcagagagacccgagaacacccatcccaggcttccacggcgatctgcccagcagctgtctttgccacatctcggatagccgattctagccttatctctgtatcttatttaatatctacacttatatttatactgacacataaccttatcc

SEQ ID NO: 1051 - DNA, 501 bp, Bos sp.
acctggtaggctatagttcaaagggtcacaaagagtaggacacgactgaagtcactgagcacgcatgcatcccttcccatactcaaatctatattaatatttggttaaatattattatattgttcactcttacatcactgtctatctagcctcttgtactggagcttctaagtcagagtctagctgtgaggagttgtgtttgtttgggagatcttagttccctggagagggactgaacctatacctcctgyaatggaaatactgagtcttaaatcccatgaacagaggggcctagtgggctgcagtccatggggttgctaggagtcagacacgaccgagcaacttcactttcacttttcactttcatgcattggagaaggaaatggcaacccactccagtgttcttgcctggagaatcccagggactggggagcctggtaggctgccatctatggggtcgcacagagtcagaaacaactgaagtgacttagcagcagccag

SEQ ID NO: 1052 - DNA, 501 bp, Bos sp.
cagaactatttctacaattttgattcagtgtccccggggcttctctttgcctatggcacaaagaaacacgcccccttacctgaaattcatttatgtgatctagaagctcttcagaatctggctttccaatatgtctctgattttatctcctatttcccctcactgactcccgtcttcattcacccagacctcctgactgttcttctatcatacgagacagactcccacctcaaagttgtggggtttttttyttcctgtacgtggaatatccctctatttcacagctgcctagactgctctctcacttttatcagatctttattaaaaactcactttcttaataaggcctgccctaccactctctccatccactcaacatttcatatcccccatcccgactgtactctctctcctcagcattgatcactatctaattgattacgttgctaattgcctgtcttccctggtaggatttaaatccagtaagggaagaggatttgg

SEQ ID NO: 1053 - DNA, 501 bp, Bos sp.
tggggagttgggagcccaggagaagccagacacactttctcattgcactagggaccccaggtcccacctcacacaccccacctgctaggaacacttgcctgcacgattgctgtaagctgactctacaataactagctacatagaacactaacctttcctctatgagtatgggtcttaactggggcttctttcaggactagctcctgaaaaattgagttgttaaaaggtgagactatatgggcctttcctgsctaagacttccacttccaatgcagggggtacaggtttgatccctggtcatggagctaagatctcacatccctcctggccgaaaaaaaacaaaatgtaaatcagaaacaatattataacaaattcaaaaagactttttcaaactccacatcaaaaaaagaaaactttgaaaaataaaaagtcaggaatacagaattggatttgaatatttaaataatatgtataaatatatattccatcagacctctcgaa

SEQ ID NO: 1054 - DNA, 501 bp, Bos sp.
catggacgacacgagccgctccatcatccgaaacgtgaaaggccccgtgcgcgagggcgacgtgctcaccctgttggagtcagagcgagaggctcggaggctgcgctgaacttgtgactggtgagtgcacaagtggagtgggaaattgagcagctccttgttagacccttgcctgggggtggggagatttcgtcagggctcaaggatcaagggctgttggtcggggtctgctgaagttagcaagatggggragggagtttccctgtttggggtgggggcaccttgtcagcatttcaacgctttggtttgtttacagggtgctggatgtctgggttgtcgccttggcccaccaggatgatctgctgttaataaagtgtttgtatcgtatgtaaacctgaggttttgtctgggttgtcattagatttccaaaatccttctgtggggcccccaggtggtcactgacccagtgtactctgaaaatggggggtgttcgccaacaag

SEQ ID NO: 1055 - DNA, 501 bp, Bos sp.
tgtattagatgcttgtggtgctcaggaccaccaggaagctaagttttggcattgcccctccctctgtggaggaggaagcccttgatcccagctagctcagtatcaggcaatccgggcttccgagctcatgcactggacatccctcttgtttctccagactcccagctccccatcttaacagccaagtgattttaggaaagcaacttggactctctgagtcctcactggctcattagtaaaatgtgagtgcyactcaagcttatccctcaagattatggtgtgaggagtaaatgaggtgctgtgcataaaaagctcttagtcagcagcagtgatgccctgggctctcagggcttttaggacaatccatttgggaacgtcttcccttccaggaacaggaggctgggcagttaaatccaatcccatctttttctttgatatttcatagtcatatcatattaagctgtgtcaaatcaccttcgtatgatggagaagaattagcat

SEQ ID NO: 1056 - DNA, 501 bp, Bos sp.
ctcacttgaatttgaatgtaatattttgaaaatacttgttatccccttgtaggtaatcagtggtaactttgaaagtgtcccttccctaccttcctacttgtgtacaaatatggtgtgtgtgttatatatatacatttcctgttaaagaaatgggattatatgtactgcaacttatatttttaactcccagtttatcaaaattattactcaagatagccacatatgaattaaacttacaattttacatactrtggacataccaaaagcctggtattttcatataagaacttgtgacattggctactggaagcctaaggcctttattttttggttaccctcacccacttgtttttccctagaggattctgagtgaggcttttggatattcttggggcttagctagctgtttgcaacacaaaactgatgaccccaggaatgggggcactgagctaccttccatggtccaaagtgcaggactccttcctttcaggcactttccag

SEQ ID NO: 1057 - DNA, 501 bp, Bos sp.
tcttatttcaggtgctcaaatacttctccctcagtaagtattaatttgattaagtgcttacagttgctaattcatgagctacacacgtaattcctaaaatttttatgtattacatttagaacaacattggaagaatcctcattatgatttttaaatacttacctgtcacttacagacaggtaggattataatctgtataaatgtgttcctctgcagaccatggggttttgtttttgctttgcctctttgcwttttgacaacatataattctcactttttcctacattcagtgctggtttatatttaaaaaaaaaaaacaaccttaattctacttatttctattatcatagtttccaccatctcaagagataatatcaacagaagtctaaaaagatggcagacagtgactatgcacaatttacagagcttattcataggcagcatcttctgaccagagttccctgaaaaagtccgttctaacagtgagcggataaaaaagga

SEQ ID NO: 1058 - DNA, 501 bp, Bos sp.
atgattatttaattggaacaatatgacaccttttatcatctttgacaaagatgataaaattaatgtgtaggtctgctcagttttttactccagtttcattttaacttacaggttagtttatatttagaaagtgggttactttaaccaataacaaaaaagatgctaattttgatccttaataccttccaggcctttcttatattttggagacttgattttgctctatcaaaggcacaatggcacccggaaaygtttgagatttgtactctgttttgtgggcttcccaggtggtactcacagtaaagaacctgcctgccaatgcaggagacaaaagagatgcagttcaatccctgggtggggaagatggaggaggaaatggcaaccaatttcaatactcttgcctggagaatcccatggacagaagagcctacagtccatagggtcacaaagagtcaaacatgactgaagtgacttagcacacacagcacactctgttttgtg

SEQ ID NO: 1059 - DNA, 501 bp, Bos sp.
ataaattgcaaggtgatcaaagacaaaaatattcattaacaataaatcctgctcagaaaatacattttgataagtactgtgagattttagaattctacagctccaagcatgcagtaaaagaggtaagaggaaagctttttcactcaccctcgcaggtaggcatttgactagtgctttgccaagttaacataaatcgtaaaaccttttcatagtcccttagcatgatagaagaaaaatgagttacaaatatytatggagagtctagtgtcccaggcagattgattataaaatgtggaaacctacataataaacagaaaaatattgggaatgttttgaacaggaaggctggctacccaactcagcactgtccagtttcaaacttagaaaaaaaaacaaacaaaatcttcagcaaacaaaatccatgctggaaaagtgatttgattatataaataatgatccttgatagttatcatcaatttaattaataattacaacttgtaa

SEQ ID NO: 1060 - DNA, 501 bp, Bos sp.
tgtttggtaggaggaagttatccagtaggaagcattcctccagctcaggtttgagacaccagacctcagaggaaaggaactcatgtggtctgtaaaaactaacagaagactaaggtttagaaagagaatgaacaaggagactctaaaaattctcttctcctgggatgacctgttttaggacagaaacaatataccttccagtctgacccatttccaactgaaagtcatgccaaggttgaatcttaaaactraatttataacctcttacagaatatttcacccctacctaggggtaggggcaaggaaacaatttttaatgaatattaggtataatttcaaacaattttgctcatcagtgatactctgtagagactcatgagtcagttttagtcacatgtatcctgtgagtcaaatgactcacgaatatgccaagcaggccatgtttcttggaggtttatctgatttctggtctggttctgcttttagtaatcctgcagtggc

SEQ ID NO: 1061 - DNA, 501 bp, Bos sp.
ttttaggaggaagtttcagttttattctcttgatatcttattagattttctagcatcattttccccttcaatccattcaaatcaatttgttgaggacagctgaaagtcagactttcctcattccaatcctagaccacctttccagcttcagttttttaaaaatgaggcaaaacagtttcatcttatacaacataaaacatcagtttcagttgtacaacatatttgtacatattgtaaaatgaccaccacartaagcctagtataacatcatcatacagttacacaattttcttatgtaacttttaagatctcttatcaaatttcaaatatattgatatgggattcactgtaatcaccatgctgtatattacatcctcgtgattgattttgtaactgaagtttgcacttgtcaaccctcttcacccatttacctctggaaagcaccaatttgttctctttgagcggagattttctgttttgttttagattctacgtataagt

SEQ ID NO: 1062 - DNA, 501 bp, Bos sp.
tcaggaccaccaggaagctaagttttggcattgcccctccctctgtggaggaggaagcccttgatcccagctagctcagtatcaggcaatccgggcttccgagctcatgcactggacatccctcttgtttctccagactcccagctccccatcttaacagccaagtgattttaggaaagcaacttggactctctgagtcctcactggctcattagtaaaatgtgagtgctactcaagcttatccctcaagrttatggtgtgaggagtaaatgaggtgctgtgcataaaaagctcttagtcagcagcagtgatgccctgggctctcagggcttttaggacaatccatttgggaacgtcttcccttccaggaacaggaggctgggcagttaaatccaatcccatctttttctttgatatttcatagtcatatcatattaagctgtgtcaaatcaccttcgtatgatggagaagaattagcataatatgatgttggagggcatg

SEQ ID NO: 1063 - DNA, 501 bp, Bos sp.
tttcttcactttctgtttctcacattttcctaaaccaaacggacaatttcaaaatttttgaaaggagtttttgctgaaaggaattctgacaagtaggatggttaagaattattaatatatccaaagcaagtagggaattttgaagacagcataatcaatgacaagaattcaaaccatggctcagaaaagatgaaatgattcaggattgaaacattagtgcttttaaggcactaggttagccccaaattagkaggatgatttataagattaagcacaataatgagtaagaacaggagatcacaaatgatatataatgagttaggtaagaattttagtaccaaatccattaagaactgtagtaagccaagggtttctttttatgggttactagctgtgtgttttgagaatgaggctgcaaacatgactagacaatattggaaaaattcaagaatagattttcatctgttcatctattcatgagtttattcattcttcaaaaga

SEQ ID NO: 1064 - DNA, 501 bp, Bos sp.
gtccctgcccgcactcgcttagaatcatgactgactgagctaagctgggtctggagagagctcagggacaggacaactcattttatcagtgacttaaaggaaggtgatgtcaatgggggctgatctcaaagcagcacctcccaccctacccaggaaagcaggagattagcagaaacagaggttaatcctcttcaggacagcccacgcctgctcctgctgccagggaggaagaggggtgagtgtagggaagrgcaaggatgtgcaaaaatgaaagtaataacagaaagagggacagtttacatttttaaaaagaaaccatgtatttaaatcaagtggaggattttaaatcaactatgtgctgtgctaaatcacttcagtcgtgtctgactctttgctaccctgtggactgtagcccaccaggctcctctgtccatggggtttcccaggcaagaatactggagtgggttgccatttcctcctccaggggatctttctgaccca

SEQ ID NO: 1065 - DNA, 501 bp, Bos sp.
gatgtgatggacagggaggcctggggtgctgcgattcatggggtcgcaaagagtcggacatgactgagcaactgaactgaactgaactgaaaccatttataaatgtcccccccacatatccctgaaactttgcatttttttcaatcacttttttcactcagatggataatttttatgatctattttctgtaatttttcttatggtatccaggatggctgagtcaaatgaaatcttactttatcatgcagargcagaactacatcaattatattgaagtctttgtctatcagtggggtcccaaagataaaattttaaaaaatactacataaaatcatctttacctctgaattatccctcaataaaatttctgtattaaaaatattagctacaaactgggaaaaatatttgcaagcaaaagtaacagtataaaagaggttcatgaagttttccaaattaatacaaaaaattaataggaaaaaagatattaagagggaaatcag

SEQ ID NO: 1066 - DNA, 501 bp, Bos sp.; identical to SEQ ID NO: 302

SEQ ID NO: 1067 - DNA, 501 bp, Bos sp.
catttatcatgtctctgctgtatatagttccatccacattgtccagcagatatataagtggaattttcaattaagattgccaaaccaaaaaaaaaaaaaagagtaccaaaccttggtatgtcaatccaaaagtaatctgtattggtgtagatcgcatgtctaagtgaggaaggctttaactgccagggaaaccatcttacttgagtatcaaaaaatgtgataagacctaattatttttttaatatgcaccrttttggaacctctatcccttaccactttggtcaatgtgccacaaattctacagcccagtaccatactcttaacacactgtctcacccgactgggaaattgcctatccaagaaagcacctcaactgttatttctatctcttggctgcctgctctttcttcccatttgttgtgtgctatccaaagatggtcctgctgctaataacagaatattctacctatccttttcaataactgatggacagatgagctt

SEQ ID NO: 1068 - DNA, 501 bp, Bos sp.
cttgaacaccaacagcccaggccgttctcctgggtgcatcccatgaacccaaaggcccacagaccagcattagtttagagacctgggccctgcaagcttgtctcagtgctgtggaatctgtcaaatggcttgacagtgtgggttgggttgtcaagtcacagcagaatacctgcaatggagtggggccaccaggcctaaccagggactaccagagaggggcaataaggggtgttattgccaaggtcagggargacagaatgctaggaatttagggaggcaggtgaagtttaaaagaccatagaggccagagtagggggtaaagctaagaagtcaggcccatcagtgggagattctatccaagacaccagatatcagaacatcatctggcaaaaacccttgctgaggcacagctctggccctcccagagtgtccttgcatgttttctattaaggcagaggccaattccaggccttgggttgcccctaaccttccttggttacc

SEQ ID NO: 1069 - DNA, 501 bp, Bos sp.
aacaaagcacagaaaattattaccaatgagaaatatgggtttgtgtattaaacacatcatctctaattaaaaaaaaaaatttaagtcttataattcaaaagaaaatttccttaactatttgagaatgagataatatatattagctttatgcttgaatacctgttgaataatttggagaaataagactaaagaatgattggattattgtctttaaaatgtaaaaacaatatttaaaatgttcatttatcgtrtatatatatccctcacaatgtcataaataggcaagccagaatagcaaagtggctgaaagcttggcattgaagtcagagatgtacctatatgcacactcagttgcttcagtcgtgtccaactctttggagaccctgtagctcgccaggctcctctgtccacgggattctccaggcaagaatgctagagtctgtggccatgccctcccccaggggatcttcccaacccaggaatgaaacctgcatctcttat

SEQ ID NO: 1070 - DNA, 501 bp, Bos sp.; identical to SEQ ID NO: 351

SEQ ID NO: 1071 - DNA, 501 bp, Bos sp.; identical to SEQ ID NO: 137

SEQ ID NO: 1072 - DNA, 501 bp, Bos sp.
ctaccttgcctggctttagtgaggactataaataatatacttaaagtagacaaaccacttccaatgataatgagcactctatccaactatctcatttaattcttatcacaacttactgggtcaggtaacatagctgtttccatcttaaagctatagaagcagagatttagatcagttaagaaacttgaccagaaggactgtgctgttaagtggtagaaccaggatctgaagtcactcaagtctttttgacractatatctgagtttgtaagtgatagtgagggcttttctggtggctaagtggtaaagaatccacctgccaatgtaggaaatacagatttaatccctggtccaagaagatcccatatgccgaggaacaactaagcctgtacgctccaactactgagcctgtgttctaggaaccacaacatgagcccacactgtgcaactactgattcctataggctgtagagcctgtgcttcgcaacaagagaagccatca

SEQ ID NO: 1073 - DNA, 501 bp, Bos sp.
ttttaagtgttgcaagcaatcattttctgaagttcttagtgactaagaaattttgtccttcacactgctgggtcatttttgttatggtaatgaatgcatttagtcctcaaattgaaaaaaaaatgtatactgcttctttttataataagatttatttttattatgtagtcctttgttaatcttaactgggagatggttttcttcaaatattattggatccacatttagaagggcctgctttacaaagtacsggctgataatgttttccaatcaacaaagcccttgaaactgttcagcttgttagacatctgctgttgaagagtgtatccagctctgaaaacaagatgcaaggaaatgcagtcctcattttctccagcagttagttgctcaaaggactatagccatttcaagaggtgctagacgtgcatgcataaggcttgatcatgctaacaatgaagaagtataatgagcatttatggtttgaagagtttcaaaaggatg

SEQ ID NO: 1074 - DNA, 501 bp, Bos sp.
tgtaagcattttctagagattcccaggaagatgtggggagagaaaccccataaaagactcgattttctgccataatacacaaagggacatgggctattactatttaggcattaaagggaagcatgacccaaccctgaaggcggaatatgtgtgagacacctggtttacatttgtataaatctttgcacaggacaatccaaccttctaagcatgatgcaaaggagcatatccaatctattaagcacagcgtytcttaactcataatatatagcatacagcaagcccgccacagccgctaacagttagtgaggtctttcaggggaactaggctggactgaaagattcctcaggttttaactcatttacagacttatgagataaatcattttactatctatatttcataactgagtaaatcgtggcataggaaagtttagtagctagaccgaaatgcagcagcagaaaggttcttatcgtatatttgtggtgtaataagctttt

SEQ ID NO: 1075 - DNA, 87 bp, Bos sp.
agggccaatttcacctcctctggccttgagaggcactgcaagagtttcctkcctgtgactacttgttcacagccttcaggatactcc

SEQ ID NO: 1076 - DNA, 501 bp, Bos sp.
gaggagacaaagacccgccataagaagaagctctgtgaacagagcaagaaaaacataaaagtacaggatatgtttggagaagtagaagagagtaagctgaaaactgcattgagtttttctcttgggctgcttgctgactctggaggcagctagactctgagaatcaaggcttagttggcccctgagaggaggttattgtgaggcataggaaaactaacacatatttgtgagtcatggagatggatgcaacsaaactagaggtctcaagcacacagccagtatatactgttagatatgaagtgaattttgaagctgcacatagtaggaagtcaaaagtcaaaactgaatatgtgtaaaacagagggggagttttctcaaacctcttggtgttaagaaaacaaagatcaagtaagatttcccctgaagatttgtagtagtataccttagaagaacagataaacaagaggtagatcaaggctttatagtatttcattccaggta

SEQ ID NO: 1077 - DNA, 501 bp, Bos sp.
  misc_feature (491)..(501): Nucleotides uncertain from position 491 to 501
agacagaatgcatgaagcaataaataaaaatgtattaaagggcagaggaagaatttgagtaagcataaagagtttgagtaagcctaaataaaaaatatatgcagaggacaaatgatctgtttcttgatgctaattttgtgatgtttcatagagatgcatgcttataaagtgtgaatttttctacagctgtatatttaatgaaaatgtattaatggatgagttaaaaaaatagctgactttttgacaggatkaatacatacagtcatatttagagacttttgttttgctgtaaaggagcaagaacaatcaaccactgataaggaagaagggtagtttgtttgctactgcttcctagatcctaaaacatctcctgatcctaagctatgccttattctgagaatctagcctcatggctcatcctggacttccatgagattcttgctttaatcatgttcatgcatcatattctgatctcccatttgtataaatcnnnnnnnnnnn

SEQ ID NO: 1078 - DNA, 501 bp, Bos sp.
tataaagtctatttctcaaatacaatgggtttaccattttgtaaagtttttaaatttttcaactttattatctaatatagtaaataatgatagatataactcaccttaaagagttctcgggaggcctcaaaactttaatcctatagaaggatcctgagactaaaaagtctgactaccactggtgtatatactatctgttttcattaaaaaaaaaaggcaggaaaataagaatttatctttgtactagtttmtatatgcatgaagaaaaactcacaaaggataaataaaccagtatgagtagttaagcaaagggaaggtaggaaatgggcagacagaagaccctttagtgaatctttttcattctgaatctatgtatgtatgtatgtgcgtgtgtgtgtgcgtgtgtgtgtgtgtgtgtgtgagacctattcaaaaacaactaaaatattaaaaaaaaaaaaaaagagccagagacagcatgacaagatgagaatgaagtcc

SEQ ID NO: 1079 - DNA, 501 bp, Bos sp.; identical to SEQ ID NO: 138

SEQ ID NO: 1080 - DNA, 501 bp, Bos sp.; identical to SEQ ID NO: 445

SEQ ID NO: 1081 - DNA, 501 bp, Bos sp.
tttaaaaccatggcatccaaccccagtgtccttagtcattttggtatgctctcctttaataaaatattctctaaactgaactaaaattcaaagaaatgaataaggcacagattttaggagggcagcttgtggcttagaaatcaaataatggatttcaaattctaaaatgttggaggacactgcctttctccttccccatggcaggtaaaaaaaaatagccatcttggtaagaacaaaatggatggactctrttttgaatggctcagtgggtcagaagcttccaggtggattttagcaatttttctttttcttatagttttctctctcaaagatcttagctgaatttgtggggagactaaaactttctgggccttcccaatttcttgggagttttgttgtttggtgtttttgtttgctttataaaaatgattgttagttttagctacaagtctaaaattaaaatcttgcagtgaagtcagaggaaagcacattaagtgggtg

SEQ ID NO: 1082 - DNA, 501 bp, Bos sp.
ttgttgaattttttagattccacatataagtgatgtcatatagtatttgtctttctctgtctgacttatttcacttagcattatactcttccagtctgtccatgttattgcaaatggcaaaatttcattctttttttgtggatgagtagtacactgtgtgtgtgtgtgtgtgtgtgtgtgtgtgagagagagagggacatctttacccattcatctgttgagggacacttaggttgctttcttatcttggygattataaataatgctgctatgaccattgggatgtgtgtatcttttcagattaatgtttttgtattttttagttatatacccaggagtgaaattcctgggtcgatggcttaaaacagtaataatccttttattattaacattcacgattacagtgcttgcttggacaaggagtaggaaggattttctcaggttttgcgtttgcagtcggatggtggctatgactggagtcatgacaaagattttcccatt

SEQ ID NO: 1083 - DNA, 501 bp, Bos sp.
aggcctggtgtgctacagtcagtccatggggttgcaaagagtcagacatacctgagcaactgaactgaactgaactgatgatgtgtgatgctgaacatcttttcatgtgcctgttggccacctgcatgtcttttctggaaaatgtttattcaggtcctctgttcactttttaattgggttgcttgttttttgatgttgacttttatgaggtctttgtagattttaaatattaactcttactggtcataccrtttgcaaatatcttctccaaactagtaggttgcctttcattttgctgatggttttcactgtgcaaaatttaagtatgatcaggtcccatttgtttattttttgcattttgttttccttacctgaagaaagagatccaaaaaaaatattgctaaaaccaatgtcaaagtgcatgctgtttgttttcttctgacttttatctcaaaatgaagagtttcgtctgtcagttgtcagcattgcactcttttatgc

SEQ ID NO: 1084 - DNA, 501 bp, Bos sp.
cctttaaaaaatgataacagtaaccaattaatgagaaggaataagtacatgcttctatgcccacaccatcctgatgactaaatactgaatgtggtcagcattcaattgtgtcagcatatggttgtctttccacttgacaaaaggatttgttttggtaaaaagccatttctcacaacagatgtccttagtctagcttctgaactgtaggcaaagtggaaaaaaataatgaaatccttaatcagttcagctgracactttaattttctattttattttttctgctatatgaactccctcttcaagtttgaatatcttcctgtgattattggaaatataggtgttgactgagtcctttcatgccagcatatacaagcagtaaatctaatgaaggcaaaactctaggctacagagacatcaaggacttatttcccttttattacgataggtgaatgaaatctacaaccatcctgggttagcactccaccagataccaaaggacta

SEQ ID NO: 1085 - DNA, 501 bp, Bos sp.
tatatttggcaaaactaatacaatattgtaaagttaaaatataaaattaaattaaaaaaaaaaaacttgtgtgcaccaagttaaagcagcttaaaacatgaaataaagcttgactgtattaggagggaaaatgttcaaatgcagcatcacagtgagagattttacatgtctcaataattagtaaattaagcatataaaccattaaggacttaaaacatttggataacaaaattaataagatctaacagaawtataaagactctcatatttagaaaagagaatacatattcctttcagatacacatgtaaggctcataattgatcaaggactaaaattttattatttttaaaaaatttttatttatttaggccacaccaggtctctgctgtggcatgcagaatattcagttgcatcttgcaaactcttagttgtggcatgtgggatctagttcctgggcatggaacctgggcctccttctggtagcaaggagtcttagccac

SEQ ID NO: 1086 - DNA, 501 bp, Bos sp.
aggagatagagccaggattcagcagacagttagaggaattagtcgtcatttcgagactggtgaagaaatgccaggttagtgacctgctgaaagagagatactggaggattcatgggtaagggctggtttcatggtttcactttctgagaatgaggccatgaagtatattagctacagactatattaactgatcatttgacatttattaagtaacttcttatgtattggtggtggtcacagagagctatagytgctgtgttctaaccataccatcctacactcagctccagaatatgccctgtaactttgtttatatcctctgtcccttgcacatctgtgtttctcttgggcatttgcagtctcgtttgctggatcttcatctacatcacggcagggacttggttggtcttgttcactactgtgttgccaacaaagtgtttggcaaatatattagatgtccaagaaatatctatcatatgcatgaataagtgaaataacaca

SEQ ID NO: 1087 - DNA, 501 bp, Bos sp.
ctatacctgaatttggtatcttgctttgctctattcaatattgtagggtaagaataatacaacttctttgaaccacttttttcccccagactcgggttattttccatcattttgggctaatgtttcttcacctcttttgtttcccttctgtttgtttaaagatgcaggagagctgtatgtttggggaagcaacaaacacgggcaactggcttcccaggctgctttcctccttctgccccagagaatagaarcacgttgtttccagaatgaaaagatcgctgctgtctggagtgggtggacacacctggttgctcagacaggtgagagagtggcagggaatttgtggttggaaagagcagctgggggacagctgtctaaatagctatgaatgctcgggattaggtaggttggttttcactgatgaaaagcttgaaggactgggaaggggaggacctgagatctattaatagttctgcagtcagtcagatgtgtggctttact

SEQ ID NO: 1088 - DNA, 100 bp, Bos sp.
tttctctatgttgggacgctcattagcaagaactttgctgctctacttgargaacatgacatttttgttccagaggacgacgatgatgacgactaacagg

SEQ ID NO: 1089 - DNA, 501 bp, Bos sp.
tgatgaggtgataccaaacttgtctggtacctaattgtctctccagttttgcatttgctctctctggactctgttctctctctggttcctatgccatggacagcttactaaacaacattcaaatcaatgcaatcctacacacaatccttactcagcatttctaccatttattaatatgcaatcatgatcaactattagctcagttattcagtgttcccttctaggcactagggagaaacctggtgatgaamaaaacaggtaagatgcctgcttccttggcggttacactcccatggcaggagacggacgacaaataaacaagcaaacaaataataaatcacatagatatgtgaagagctgtgtacagagttaaaatgtgaggatgttgaagagaataacaaataatttcttgttttgtgtagcaattaaggtagaaggaaacataaggcacacccaaatgggatacagagagacatttataaagggactatttacaagtat

SEQ ID NO: 1090 - DNA, 501 bp, Bos sp.
  misc_feature (1)..(46): Nucleotides uncertain from position 1 to 46
nnnnnnnnnnnnnnnnnnnnnnnnnnnnnnnnnnnnnnnnnnnnnnacaacagttgatgcagttgcaaatctgtccattttaaggcccagggttgtccccaaggagtgattctgacccactgcagatgttgaattctcgttttaaaaaaaatagtgctgagcctgatacagatgttcccacattgcccagtcctttgattaaccttttatgaagtatctgcctaccggaatctcgattaggatgttcccaygtgtcttattaaaaggctgccaggctttattgaactttgtgtttatactttgtgttctgtggacagttttggtgccgagtaagtggaaaatagaaagcattagcgtacactaacaaggatgtctgatgtttgatgctgagttgagtttgaaatgggaaacgtcatggtttgattcgctgactgtcatgaaagaataactgtagttacacgaataaggggcttcccttgtggatcaagctgggaaagaatc

SEQ ID NO: 1091 - DNA, 501 bp, Bos sp.; identical to SEQ ID NO: 164

SEQ ID NO: 1092 - DNA, 501 bp, Bos sp.
tccccaagaaccactctgcggtagaccctgtatcctgcctttgattaagaggtggttgatctacctggcctaccataccacatatatcccggacttcctctgaaaatgcaactccaacatatgcaaacaatgcttcccatgtccaattctaaaataattttaacttcttagttgacttactatttccatagacttttcatcaatacaatgttaatgtaatcagataataggtactcactcaaattgagaascttaaattatttagtgatttggtaggcatagaaaatgacacataattgctttgaattgtggatatgggaatcaatggactcaacatttactaacgattccaagtataagatcaaaacagaagataactacttataaatggacactggagagatggaaaaaagggataacggtgattttgctgcttttaaatcatataccataaaattcacccagtgacttttaatacatctacatatttgtacaatgatc

SEQ ID NO: 1093 - DNA, 501 bp, Bos sp.
aaagactttgcaccctacaattggcagttgctaaaaatgcactctgccggctaattttataaaggtactgaagaagaaatcccatcaccaaacgctgaatttttctcattctctggtgtaacacttaaatatgacctattatatcaactctcaaaagatataatgggtcatatttcggagctattagctcaaacagaattgtgcatgatttcaactgaccgtggagagagtacacaaggtggttatttttkcccccaacatcaatatgcttttcatcatcaactatggggtcactgttcagtaattatatttttgctagaaaaatatatttgaatcacattaaaagaaaaaaaaaatctgactccttgaccctaattagggggagttggggatgaaggtagaaaacagattatcacaattcttttgcttcctgctgctgggattaaaaacagaattcagtcacccagccttcactcaggttcaggacgttaggtggcacag

SEQ ID NO: 1094 - DNA, 501 bp, Bos sp.
gtattaagttattatcttacaacaatgaagtatttgtagtaacatcccaaggtcctataaaaatcagaactagaatttagatctaaatgaggttagcccaaactctttttccattgtcatcctggcccttcagatttattctcactgagggaaagggaagagaattgtccatggaaggcctcactgtgaaaggtggaccttggagaatggatgaggaaaactctgtcagatgggcatgggtgaggaacacrggaggcatcacacctcaccccaccttcccaggacttggtccagccctggaagtatgccccatgtcccctcgcagtcaaggtggatttcccctttgcctctggtattcctttctgcccttcatctgcttcactcttcccacccaagcagtgggaacatgatagtgagacaaaaagagaaaacactatcaggctatagaaagaattgatggagacatttttagataatattacttcatttaaaaaaatgtgt

SEQ ID NO: 1095 - DNA, 501 bp, Bos sp.; identical to SEQ ID NO: 123

SEQ ID NO: 1096 - DNA, 101 bp, Bos sp.
cacccaggctttttaggatttggtttttccactaaccagttgttgacaaayggtactattccaaggctctgccaattgatatgcctgcaggagccatgtgg

SEQ ID NO: 1097 - DNA, 501 bp, Bos sp.
  misc_feature (450)..(501): Nucleotides uncertain from position 450 to 501
cttgggccaagtgaactctaagagtctttatgggtcttgttgttgctcaattgccaagtggtgtccaactctttgcaatcccatggactgcagcacaccaggcttccctgtccttcacagtctcctggagtttgctcaaactcgtgtccattgattcagtgatgccgtccaaccatctcattctctttttaaggatctgaatgtccctcatttcacagtgacattattattttcaaaaaccttgtgttagstcaagctttgaaataaaatatagcagactaggtggcttaaacaacagaagtgtacttcctcatagtgctggaagtccaggatccaggtgccagtgatgatgtccctcctgaggcttctctccttgacttgcagatggccactttctctcttgtcttcacacggctcttttctccatagctgcacactcctggtggtgcnnnnnnnnnnnnnnnnnnnnnnnnnnnnnnnnnnnnnnnnnnnnnnnnnnnn

SEQ ID NO: 1098 - DNA, 501 bp, Bos sp.
gtgtgctgcaattcatggggtcgtaaagagtcggacacgactgagtgactgaactgaactaaacttcaatatggagaatatacggacagtgataatattcattaaatttggcttgataataacatactgaaaacttctgttttcctcattaaacatcacactcaccaataagattttacttctttttctttctttcttttttaaattatagaaatcatttaaattctgtaataacatcctcaagggaaggyaggaggcactcagtttcatttataaactaaagcatgaacagtatttttttattacttgtctatgcatctttcatcacaacttcagtgaaagggtgttcatatgaaaactacctttgcttttgattttaaatgcaagctttgaatttaattagaatataatcataattattgatttaggtcatacctggatggtctagtggttttccctactttcttcaatttaagtctgaatttgacaataaggagttca

SEQ ID NO: 1099 - DNA, 501 bp, Bos sp.
tataacaatttacacttccatcagcttcagcagtttctgagaatggccatttcaccccacccttgccaacactgaatattctctctctctctttttaatctcatgtatctgatagacatcacactcatagctctgtaaccacaaactgtacttgattttatttagagaaaaatagatgtcactgactcagaatagttgaagaatgacaatttgttgttaaaacacctctcattcccccataatcaaatagraaagccccatgcttcctttttggggcatatggatatgattattaagctatcaattatgtctgagaagcacacaaagtgcttactgatgtgtaaatctctctggggaacagctcatctgtgtttccacacgttgtaactagggagcctgggaataattggctttttttttttggtgagtgagtacttgcccatccctgaaggactccaaaactctgctggagggacatttgatcaggccctttttagaggc

SEQ ID NO: 1100 - DNA, 501 bp, Bos sp.
tttgcaaagtacttgttcatgtgttttctcatttgggataggaaaggtgtacaaatgtgttatgaagccagtgtatctggtacttggtagtttttgctcagggatgatgaaatcaagcttgaaaaaggtgtgattggttaaagctcacatactcctaggtggcaggaccaggactggagctcaggtcttaagttctctcttgagtacctggcacaacctctttgctcagcacaacactaaggaaattgttstcaactcatgcagcttccggcttgtatgatatcttcacttctgctgtggtaagccattctctccccatcttccaccaattttgaggaactgtttccccctaatttagcccaccccctaaattcataggatcccagtggtgaacccccaacatccttataattagaccaggctggacacctcacccaattagtgatccttttctggtaaatagtaattgggatgaaaggattctaatgtccatttgggctc

SEQ ID NO: 1101 - DNA, 501 bp, Bos sp.
gttgatgcattttacagtaagttatagaatcaaatactttacacgtgttaataagcgtcattcgttttcttggtttctgtttgttttggcctgtgcctcgaggcctgtgggatcccagccagggatgggacctgcaccccctgtggaagtgctgcactggacctccagggaagtcccaagttttcttcttttattcatttacaattctgactataagaaaagtttgtaaagaatctagacatgttgaggtrgatccatagcactggtccccatgctcaacttttacaattattctgatgtatcagagaagacgatctacagtgatccaaaatagctattaaattactcctcccttctgcagcagcaagtctgtgtgaaggcagattttctgcctagagagcaacccaaaaaaccaaatcctaacagattataggcagaagcaaatatgataatccagttgtctttcatttaagccaaacataaaagagattggcaaaaatg

SEQ ID NO: 1102 - DNA, 501 bp, Bos sp.; identical to SEQ ID NO: 487

SEQ ID NO: 1103 - DNA, 501 bp, Bos sp.
ctattttcttctgtttgctcatcttagatatcaaacttcctggaccaattccctagttttatgatttttgtattttctagttctttatcttttttcccatcctattctcaaaacattttttcaattttgtctttcttttttttccctattgaattttcagtttctttctgcaggagagagttaacacacaggtctgattgtgctgtctctaggaggttttaaagatggctcctggcaactgggtctctggyatgcactccatgctactaagtgataaaagtgttaaagtgttttaagtgcctggggcactgaattctgttctattagcctgactagagtgtttgtgcaaacaatgtgatttaggatgaacacctgcttttcttctgacagtcaggaacttcggtaattgtggctggttccacaggcagagagtacttaaatgatcagcattaaaaattgtgaactgtgagtcttaagatggcttacctggcaaaaatactg

SEQ ID NO: 1104 - DNA, 501 bp, Bos sp.
ctttaaagtccctcagtaataataataaaaatcatggctgtaatttattagtctcctattttacactagttactgcaagagttttacctgcattatttttaattctcagagtatctgtataaaaggtgagtattattacacctattttgcttaataatacccttatagaaagaaaataagacatattatcatttgaatgtcttcgtttccatttgtactgtggcaggtatgtgcatttctcatttttctcmcaacttttggctaagcagagataagcattactccttccaactagcagataaactagaacaagatggagttaaataacttactcaaatataagagtcagacacatgtctggggccttaatttcaccttaggctattttttcattagatcaatggttttcaaattaacaaactcaacagttacatgcctgtggatggtgactgcagccatgaaattaaaagatgcatgctcctttagggcttccgtggtggc

SEQ ID NO: 1105 - DNA, 501 bp, Bos sp.
tccaaaggactctcaagagtcttctccaacatcacagctcaaaagcatcaattctttggtgctcagctttctttatagtccaactctcacatccatacatgactactgggaaaaccatagccttgactagatggacctttgttggcaaagtaatgtctctgctttttaatatgctgtttaggttatagcaatagatagctgataaagtaactgaacttccccatgcctttatggatatcctcttataagcsctcctcaaattatctgattttgagtatgccatggacatattcttcccattttgagtacagaccctggctgatgctcctaccattacagttcaatgaaagactgctttgggagaaaactaacctaggttctttctccccatgctcctgaatcaatagaaatatttctctaggaattcctaattaaaataattaatagttacatgcaatagatacttggtagcaattatattgcttgtattacttgtaataa

SEQ ID NO: 1106 - DNA, 501 bp, Bos sp.
  misc_feature (431)..(480): Nucleotides uncertain from position 431 to 480
ctttgagatgtcagtaaatacttaaaactgaagagaggtcttcctggataactagtagcctggaagcccagacgcctttgttgctatgctagggtgggccgctcattctgcctgtcctttgcctcttccggttgttccttcagtggcaggaaggaataccatagagcaccacccgccctggacacctgcgccaacaagcccactgtgggaggagtaaaagcacagtgctcggtgggctgtgtagggagtgytacgtgtttccttggcacccctgtgaacagcagtggtgatctgccacagcaaataaaatgttggtgctgctgctcagcgtggatttgggaaaaaagcaaccagtgaactctccccactgctgataacatctcacatttgtccctttctctccttagcttgccatgaagcacaaatgttgnnnnnnnnnnnnnnnnnnnnnnnnnnnnnnnnnnnnnnnnnnnnnnnnnntgtgtggtaattttctgcatg

SEQ ID NO: 1107 - DNA, 501 bp, Bos sp.
gactccatgttggatgctgagttttcctttgctctctggttttgcacccaccgctacttatcccctatccacacccagctctggttcatcccatttcccctctagactccagtctcagtcatcccagggacttagttatctcagggacccgccactccatcctcaactggccctcacccagtgcttcccgtctagaagagaactgtcctcgtagtcagacattcagtacccaccagtgtggtcatcttagrggcatttgcactgtttaaggcagagccttctgcaggctgggggaggggactgtctgtgctgagaccccagggtacttttcagggagaaggaaatgctctgtatttcatttatggtggtggttatacaactgtcctaatgtatcatcctataggtctgaaaagggtacattttactgaatataaagtatgcttcaagagatcagacttaaaattttaattattaaatctccaatgttcattatttgactct

SEQ ID NO: 1108 - DNA, 501 bp, Bos sp.
tctgctcatttttgattgggttgtttgtgttttttatattaaactaaatgagctgtttatatattttgaaaataaatcccttgtcaatagcatcatttacaaatatgtttcccagtccataggttgtcttttcaatttgtttatggcttcttttgcagtgcaaaagcaggaagaaatagaaaatataaacagaccagttatcagtactaaaatgaaatcattaatttaaaaactgccaacaaacaaaagcycaagaccagatagcttcacaggtgaattctaccaaacatttagagatgagttaacatctgtccttctgaaactattccaaaaaatctgcagaggaagaaacatttctgaacttattctatgaggccagcatcactctgataccaaaaccaaagatatcacaaaaaagaaaattgtaagggcaatatcactgatgaacatagatgcaaaattcctcaaatactagcaaaccaacttcaacaatacatgtgt

SEQ ID NO: 1109 - DNA, 501 bp, Bos sp.
cagggaattgcaaacattttggtgaggaggaggattaggacaggataaggatctctaggacttgacctggtttgttctgcagcctttttgctcattgagccctttgctggattcgataatactgaggaatcagttccttcaacagcaccacactgtagaagacctgatgtttagggacgcagacaccgtgtctaaagatctgacacacggtgggtgcttagtagatttgggtgtagtaagagaagactccygagggttttcatctctctgttacactcctgctctgatgccccaagtgaaaagtcccgaaagtttgggaggacatcacaaatatgtagcaatctagtattgaataggacttattaatcagatcagaaacagggtgtaaacaacccatttggcactatctgtgtagacccagtgtacacagcctgcccggaggaggctctttttaaaataatagtataaaagtgagttacctgcatttttgtatgaactttg

SEQ ID NO: 1110 - DNA, 501 bp, Bos sp.; identical to SEQ ID NO: 784

SEQ ID NO: 1111 - DNA, 501 bp, Bos sp.
aaatgctctcatcctgggcttaggtgagccctgaagccaataactggtgtccttttatgagaaaggagagaattgagaggagaagcacaggggaaggagtatgaaggtggaggcagaggttggggtgatgtgtcgataagtcagggaacgtcagcgattgccacataccattagaaactaggacagaggaatggaacagacgctctcttaaagacgcaggaagcagcaacacctttaacaccacgacaccygctgacatcttgatttccgacttccggcaggattcagaactggaaggaaatggatttctgttgttttaagcctccatgtgggcggtaattcatcatggcggccacaggaaaccaatataggtgcctgggagggatgccccgaaggatggagcagctgcacgtggcctcttcgcacggctttggctgctcatagggtggtgactactttctgtgatggagcttcctgagagcaagtgtcccaggcctatga

SEQ ID NO: 1112 - DNA, 489 bp, Bos sp.
tctccaagcatcatcttctcaaagacattcacggaaaactcttcaccagtttatctgctctagcactgacttggagaagcttttctttcatctctgatctggaagcttcttttcgaataaaatagaaatgttgaatggctctggctaagaaatccttttgaatttcagacaagagttgcagtaactgagtccggtttattcaggaagagtggagccagaatgggtctgctgtgaataaratgacaggcctgctttcttcacaggcgacttcttccctatgaccgaattctttgatgttaatgtaattctcattaattgctaacgccaaagcaacagagcttcaatctttgaaaggactgccttttataaattcttattgtttgagatttctgctaaatggaaagaccactgaactgctagttttttgcttcagagttagaaagcagggactgtttaagtcattactttctattgcttgacatttgtgta

SEQ ID NO: 1113 - DNA, 501 bp, Bos sp.
gtctaaccaccaaatatctgataagtaagttgttagggaaggataaagatgaacattattacattagaaggcaatatcattgttgaagctgggtgataaatactagggaacttattttaccattctttctacttcgtatatttgaaaatttctgtataagtattcaaaagtgtaacaaatccaaaattaaattaatagaaaacaatttttataagtatcagggataatttataaaatcttgttttggggartattttttttcctgaaaagactattgtttaaagataggattgtttacatgagaaaatactaattatctggaaatatcaataacatatatatattgtgtgtgtgttagtcactcagttgtgtccaattctttggaccccatggattgtagcccaccaggctcctctgtccatggaattctccaggcaagaatactggagtaggttgccataattttctccaagggatcttccagacccagggaataaacct

SEQ ID NO: 1114 - DNA, 501 bp, Bos sp.
gtgagaaggcacatgtgctgggtgacaactgtgttctcataggtgagcttccctccctctgtggaagtttgaggaatcggccttcacccttctggggatatttctgtgcatgaatcaataccctttccctagggtgctgaagagattcatttttcaaaaaactcagtgtgcagtgtattaaactgttgtctcagctccaagtccttggagactctgctctgtgccaccagagctaggactctgcactgcayatttgtgccctgggggaggtgtggtccaggggacagcagagtgggaggcagagattggtccttcctgtggctccctgcagccccatgaacccatctctgtttctgctgccatgaagactctggtgtgtcctttcccagcatggacagaaacagcctcactgctccccacccatcctagatacctgtcaccagctgagcagcctccttgctcaggggtggcctcaggccccttcctcgtgagtttgtaggg

SEQ ID NO: 1115 - DNA, 501 bp, Bos sp.
gcagagtactttagatgtggaataaagaaaccagtagaatttttgtgttcccacagtaccagagtgataaaattagaggcttgatgggtctccacataaaggcagctttcccctttaaaacctttgtcacagttgaagttgttcaaggtggaagataaaaagctaagacaaaactgaaaatcaaagcagaaattgcaatagccttcattctgaggagacaaagacccgccataagaagaagctctgtgaayagagcaagaaaaacataaaagtacaggatatgtttggagaagtagaagagagtaagctgaaaactgcattgagtttttctcttgggctgcttgctgactctggaggcagctagactctgagaatcaaggcttagttggcccctgagaggaggttattgtgaggcataggaaaactaacacatatttgtgagtcatggagatggatgcaaccaaactagaggtctcaagcacacagccagtatatactgtt

SEQ ID NO: 1116 - DNA, 501 bp, Bos sp.
tacagactgctagtgactgtataacatccagctgaagactagcagggggtactctttctgctccctctgatgcctatgttagaagctttctctattgcctttatcctttaataaaactttattacacaaaagctctgtgcgatcaagccttgtctttggccccagactgaattcttctcctctggaggccaagaatcccagcatcttttcgttcagcaacaacctttcatgacattttagaattgtttagygtacagttcctctgtatatctttacagatctcgaggagtttcaatttaatgtttagccccagcagaggcaagcaactacatatgtgatttagagagctctgtatttttattcactgctttttctattacactcctccatgaatttcagctgctttagcctttccaatattcaaactttctccaaaactcagtgctctacttggctgtctctgactctgctgcagacgataaagcacttccaggcagacag

SEQ ID NO: 1117 - DNA, 501 bp, Bos sp.; identical to SEQ ID NO: 350

SEQ ID NO: 1118 - DNA, 501 bp, Bos sp.
atttagaggctaaatagatagtgaaaggcagcaatagatgaaggaaaaacctaccagactaaacacttagggagagctcacctcaggacacctgctgccacgtacaggatgtcttaatcaagaagcatttctcagaaagacagggctcttgcttgactttgttatagatagatagataatgaggtcaagcaagagtcctgttaagataagcattttataggtgagaaaaaagaggctcagaaaggttactyaacttgcccgaggtcacacagccagaaacgctgagtaggaatgtgaatcctggtcagcctggttttaaagccccatgccctttatatgatgtgaaggatacaagctgagaactgattttaaaagctgtgttcaaggtatgttctagattagtatacatatccaaatcattcttgtatttaaagtatctacatttctatcaagaacattaacatctacacctgcaacatggtccctcgaggcagtccctaa

SEQ ID NO: 1119 - DNA, 501 bp, Bos sp.
ggaaatgttacctatttcaaaggtgtggggatctttctcctgtgttttcgtctggaatgttcacagggagcagtttttcagggaggtctctgtcccgtctgagttaatgtttgtgcttggtgtgaggtaggggtcagagttctttttttccctccacagagacatccggttgtttcagcaccatttgttgaaaagaattattccttccccaatgaacgatctcggcacctttctcaaaagtgagtggcccrtacgactgtgggtggatgtctggactctgctccctttactgctgtctctccttatgcgaatcccaccctgtcctggtgaccgtagcttcacaggagacgctggcgtcaggcagcatgagtccttcttggctcttttttccctgaaattggtttgcctctcctctagttttgccttttcatatcagtgttagaattgctttgttgatttcctcagattaattaggctgcattaaatctacgcttcagtttg

SEQ ID NO: 1120 - DNA, 501 bp, Bos sp.
gaccaatggtctttccaaaatccctgctcttttctcctctatcccccaacttttactactccatgactaagaagacactgtgatgatcagagtcaagagactcacattctactcccagactgacacttccctgaacttctcatttcctttctgtaaaatggaaagattggaaacaagactgcagagattctgaccagcaaaagtattctgtgattccattagcaaatctaaaccctgcaccatttttatgratgcagagtgggtcagaaatcagttacaccaccaactgtagtcttctgctttgactgatcacttgtccagttgtccagtctttcactcattaccttgatatctgcctccaaagttctcaccctctgcctggagcaacatgggcaggaatgtaatgaacacaggtgaggcagggaaaggcaatataggagacttgagagcatgttcctcatgcctgatggtttatacaacagccacccaaattaaagcgca

SEQ ID NO: 1121 - DNA, 501 bp, Bos sp.
  misc_feature (464)..(501): Nucleotides uncertain from position 464 to 501
ggagctagaggtgccagcaataataatagcagtggaagaagataattatggccgcctctcagggttaattttgtataaatgagatgatatccaggaaatctgtgtgaaaattaagtactatacagaatctgtggcggttatttattctagaaaataaagagcttaaagggtgtaataggaattttgcttttaaaatcaacataccaacatttagcaagcttatttttatgaaatcgttgttacacactttyacctcaggacagaagagactttttacaagagctaaaacttttgctcggtgactaataaggaagctgagccatgaagagatgattccgtcttgtctttcagggcgcgccatgcctgagccttcctcctcccccggcgtctgagcgcagccctcagccgggaggggctcctccgtccacctcgcctcggcccggccctcaagagcagaagccgcnnnnnnnnnnnnnnnnnnnnnnnnnnnnnnnnnnnnnn

SEQ ID NO: 1122 - DNA, 101 bp, Bos sp.; identical to SEQ ID NO: 399

SEQ ID NO: 1123 - DNA, 501 bp, Bos sp.
catcaaactaagatgcctcactcatcatgtgaaggtgtatgacttgcctcttctaaggctgttcttcctttctgacgtgccctcttttcctttcctccctgcatactgacatcctgtcaaatctacaaggaccgtatcaaatgccctgtcctttgtgaagcctttccacaaatggacaggattcctctgtctttgaattcctgtggtacttgctatatagctctttcatggtgttcttctgtgaatcattygctttactccagagtgctcatctgagcttttcctacctctccagaccctgcaccatattgtaagctctttgaaacagtggccacagtcttagctcataattgtccttcctgaagccatggcttcagtaccttgtacatagtggacagtcaataaattaaatggccaggtaatgtaattgggttaatacaaaatgatcgtatgctaggcttcacatataaggtaatactgtgtatgtcatgaggaggattt

SEQ ID NO: 1124 - DNA, 501 bp, Bos sp.
tgtcattctcttctaatcactcttcacgatggtgacggtagcacttctcagtaatacgacataagtccattagattgtaaactctacaagggtggggaccatactgcgttttgttcatgcttatgtcttaaatatttaaatttcttgacacctactaggaacctatttccattcactgcctgaatgaagaggtagtgcggtcccgagttctttctttggtacaaaccttaaagactctgagttgctagtcmaatagaagaaatgaagtcatcttccttttcttccttaggttataactacttaaggataaaaatacttgggtttgtagtgggctgaatccttgaaatctcttccttactccaacttggtctgccttgagattaatggtcattccctgcaatttttttttattaatttggatgtgcttgtttatttgcaccatctcctcatgatttaataaacatttagaaaaacattccactactgttgatttattaattt

SEQ ID NO: 1125 - DNA, 501 bp, Bos sp.
taatgaaaatatctaaccatccacataagaagacaaatcattatgtttaagttctttataaaagaaatggtctattcttgttaggcaaagttgtttttcttttttttcctaacacttgacacaacctaatactgaaggcttagacaagtttagttaaatgaacttaatttctcattagttagttaaggatcatggtgtgttacctcccggtatgaaccctcatttccagctatcatttagttgtgctttgygttattttccatgctaccatctgtcactgggctacgatctcatcaagtttccaagtccagctggatggacttctaatggcccccattctaacagcgtctaacagtttagaagtgctgatgatggtgaattatggtcactttgcacagaatcatttctgatatataatttttttctaatcttgatgtgataggtaacatctaacacactccccccctttatttctctcttctctttctatgggtatctaaa

SEQ ID NO: 1126 - DNA, 501 bp, Bos sp.
attgaaatcagttctaaataaagatctgaaaatgaaaacttcaaagagaagtaactttttcccaaaagatgagtgatgaagggaattctggataaataaaatttaggaggattctattccctattgtcgcaattcctttcccttccagggaattgcaaacattttggtgaggaggaggattaggacaggataaggatctctaggacttgacctggtttgttctgcagcctttttgctcattgagccctttrctggattcgataatactgaggaatcagttccttcaacagcaccacactgtagaagacctgatgtttagggacgcagacaccgtgtctaaagatctgacacacggtgggtgcttagtagatttgggtgtagtaagagaagactcccgagggttttcatctctctgttacactcctgctctgatgccccaagtgaaaagtcccgaaagtttgggaggacatcacaaatatgtagcaatctagtattgaatag

SEQ ID NO: 1127 - DNA, 501 bp, Bos sp.
aatttcagtattttgaaataatgtgatgtagtttttcattatatgatttaaaaaaaaatttaaagcttttcttcatgccagcagaagagaagatgtgctctgagaagacttccacggtggatatggcctcgccttgggctctggctctgtttccaaacttgtcacacagactggtgcatgagcacccttggtactgcccttgtctgtcaagctgggccacaggtaactttccaacattttagctggaaccrcacctgcagctctgtcagaactcctctgtgtaagtttcagaggcacagtgattttggtttgttagaggtagtgccgtcatgaggtcgtctggtattttaggtttgtattttttccctccagtttgggggtgtccccactgcctgcccacatccagccctcagaccctctctcgcagccacaggggcagtgccccatgcaccaatccaccgctgggctcacattagctggcctccccatcacgatgactgt

SEQ ID NO: 1128 - DNA, 501 bp, Bos sp.
caattaccaacattttgccaaagtttaggaacaaacaccctgggggtccatacataaggtttgttaaccactgcctgtttgcacacatttgtaggaaggtttcaaaaaattaacttgctaggtagttgtcttctgactcatcaagctgtataaccatgtgaccatctgatgaaacaattcattttaatgagctaatacaagaaagtaaataaaattctatgccccaattctccaattttggcctgaagatktgcatttcaagtgtgcctctctagagaacgtgtttcttattgtctgttctaacgagtgactttaaagccagaacactgatcaatgctaacatgtgagaaactattaatactagagtctggaaatgactcattcaaaagaatcggacagaccagtactctgagctcatcagatggcaatgcccactcccatcagcaagactaggaaaacctcataatccagtgggtactgggtaaagtttaaaggaagatc

SEQ ID NO: 1129 - DNA, 501 bp, Bos sp.
taatagtcagctctccgtatctgtgagctccaaatcctcagattcaaccaaccagggaccaaaagtatttttacagaaaattccaaaaagcaaaactggaatttgccacaaatggacaactatttattttgcatttacactgtatttacatagcatttgtgattattagatattataagtaatctagagatgaataggagggtgtgtgtaggttatgtgcaaacactacatcattttatacaggggacttragcatcctcagattgtggttttcccaagagttctggaaccaatcccccagagatactgagggaggcctctattttgttcttactcctcctatcttatggcactattgcccatgtgagcataaatcaccttatatttatatttaactttcaatctacatgttactgattcttgatcaggccaaagctgtaattcagtatattgagtccaagtctgaagattttgtgagacaggcctaagaaaaatctatat

SEQ ID NO: 1130 - DNA, 501 bp, Bos sp.
ttaggaggtaggagatatggattttacttttactcatgtttttatgcatctttgagcactttctctttctacaactccatatactcatctgtaaaatgaggaatttgaagtaatcagtggttcttaaataatttggaggtcatgaacttctttaaaaatctgaagaagtctttgcactttctttccaggagaaagaaaaaatacacaaccagactaaattgaatttagtttcaggaaggagttttactgaycattttcaaggccatcatattcagccatagatattatgcaatacataatacgtactttagaattgtacggttccaaagggcacagttcatatagactaacgacaccccttcagaggtgagcaaagaggtggcccttaaactccagggctaagaactcttgggccaagtgaactctaagagtctttatgggtcttgttgttgctcaattgccaagtggtgtccaactctttgcaatcccatggactgcagc

SEQ ID NO: 1131 - DNA, 501 bp, Bos sp.
cattagttcccctgtgctcccataacacactgacacaaactaggtggtttaagaacaaaaatttattgtctcacagttctagatgctaagttcaagatcaaagtgacagcagggcatgttccttctaaaggcactggaaaaggatgtgttccagccctctttcctagcttctggtagtgcccaggattgtaacagcataactctaatcttcacagggtattctatcagtgtacatatctgtttctatgttytaatttccctttaagaagacaccagtcatattggattagggccaacactgatgacctcaccttaacttgaacatctgtgaagactgcatttctaaataaagtcatattcacagatattggggatccagtaccttttggggcaacccagctcaatccataacatcttgttagtgtcagaagactcttaagaatcctaaaattctattcactgcatctagctggatcttatgttgatactctaaaccatatg

SEQ ID NO: 1132 - DNA, 501 bp, Bos sp.
tggcatggccaacaacttaaaaattaatttaaaaaaaaagagataaaaatgaggtaacatgaatgaaaattagtagtgtgaaaaggaaaataagaaagaagaaacaacaaactgacttgataaaagaagaatgaacagaatttacaatacactcatttatcagacaggatttgaaggtgtgggtgggtttaggacatttgattaactgcaatatttcctgtgattacatcatatatcaaattaccagaccrcagactacatgtcctctgggaaagcaaagtgttaaagtgctacaatcatatactagagaaattacagcagtacacataaacatatgggattcagctacctaattaaaatcccagtgagccagcaacagcctaaaactgtgagttcagtgactgcccgaagaaaacagcaaattagacactcacaatggcaacatctcagatttgttccagttgacacttcttatcaaaaattagcaaattttaaaacacc

SEQ ID NO: 1133 - DNA, 501 bp, Bos sp.
gccaggctacatggcatgtgggattttaattccccaatcaggtgtcggacctgcacatcagaagtgcacagtcttaaccactggaccaccagagaagtcacctgctccataattttagattgtcgagtcataggagggtatagggtgaaggcatttatatctagttttatgattttatgtacataagattttttaaataatattaccactgggaatcccaggtcaccttgtctctgcctaccttgtccctkgctaaaaagtgacctttcagaaagccgtcaagaaatgctgaaaaaggtaaaaggattgaatgttaaaacctaaaatgtatttctttgaatttcatctttaaatttactcatgatatcatttttttggttttgttttgtcaattgcctctttttcgtaaattgagagttaactggatttcagttaaaaatcttacatgtatcaaaataaattaataatgctatcagaaaatgggaagaaggtcatcttgtt

SEQ ID NO: 1134 - DNA, 501 bp, Bos sp.
agtccacaatattacagcaagaatcctaatggactcaaatcctcagtcccagcacggcaggatgggagaggacacacacagctcaactgtcaagacagaaaggaagaaagtctcttaattcagtcttctaactcccatcccaccattctgctacgctgcaagtcgatctttttttataatgcaaatctgaatagatttccgctgaaaaccctttcaccacatctaaaaacagatacctaatgaagttgggyttccctgatggttaagtcggtaaagaatccacctgcaatgtgggagacctgggcttgatccctgggttgggaggatcccctggaggagggcatggcaacccactccagtactcatgcgtgggagaatccccatggacagaggagcctgatgggttacagtccatggggttgcaaagagatggacacaatggagagattaagcacagcacagcacaactatgaagttcttcaagctgctgtcttcctctcc

SEQ ID NO: 1135 - DNA, 501 bp, Bos sp.
aagttgcgtgctgtctctttttcctctcttcggcctctccagccaactctgcccgtcccctgagcccctctcagcctctgctcccatcttcccatatttgatccctctgcccattgacaccagacctgttcctctgttccttcttcacgtcctcctgccagactttgccaggagcctatttttttctttttcctcctgtgatctctctaggtgcttggttttctgctgcgttcttgacttcccgcatctasgtctggatttcggttgggaagcaaattttgtcttcctaggctcagctttgattgactttcacctttttaacttgtgaatattttgagcctctctccgcattaagagaaaagggaccgctcttccacgaatgtatcctccggtagaactttacagtgggagacagaaagtagactgtagtgatgtggcttttcagtttaaaaatgcaagatgaccgtggcgctgctgctgttgatttctcattatcctggc

SEQ ID NO: 1136 - DNA, 501 bp, Bos sp.
aaaagctgcttttctttcctgtctactgtgtggatgacaaagtcagacttgccagagaccttttcagttttatacttttttaccttagcatcatcttacaaatcatgtctaaatctatgcctcattggcttctgcagaggtcaagtcatgcttttggagttcaagatcaagctgtatctctataaagtcaaggccaacatggactgctctataaagtggagctgtcccagtttgctaaggtccttgcaagmcttgtttgctaaagatctatattttctatgagctatgcctgctaaaaatagccctacctctatcagtgaaaccacttgactgtgaacaaagctgtcataaaccataatgatccaccaagggcaaaattctacttaggccacacttactaaagccttaaggataaagctctcggccaatctctttctctctgtgtgtgatattttgttctgcaaagctacttcttgacttttctcaggtttctaactggta

SEQ ID NO: 1137 - DNA, 501 bp, Bos sp.
  misc_feature (469)..(501): Nucleotides uncertain from position 469 to 501
gacactcactgatgtttgatcctctctaagttaaaatcctggaaacaatattccaaaagagatctttgctatgagtaatatcatcattaacagtgaggtacatggagcttattttgaagctataaaagaggatgacaaaaagcatatatatatggaaacttggagccagagaaaatcagatggtttttaacaagctatagcagaagaaagaccacatttttgtccccttaaaccaagttttaatgaagaaragattctgttatatatgatttccagtggtttaatatggtggattgagagactcattgtcatgcccttgagaaatgaaaataactgggtcttaattttttgctctaacattaattgccagacatcaagccactcaaggatgggctatctcatatagactatctgttttctaaaatttaaatctgcataagagactctgaggccaacaagcacacaacgnnnnnnnnnnnnnnnnnnnnnnnnnnnnnnnnn

SEQ ID NO: 1138 - DNA, 501 bp, Bos sp.; identical to SEQ ID NO: 522

SEQ ID NO: 1139 - DNA, 501 bp, Bos sp.
aggagataggggtgcagccacttccttacgcctctggcgtggggtggggcccctctgtcatgctccgcgaagcgtcctcgggcggaagcgggaatttccctaaagaagagccaaattaaagtcggagcaaagatccttcgagccccagctgtcgtctccagccgtgctcaggaaacggaaagaccgagtgaaaatggatttaaatgacagcctcaccatcctaaatggttctgcgtaatatccaatttggkatttctggtaaaatttaaaagtaaaaatgaaaattgggtttgcatgtgcttgttttattattaaaaactaattaccagaaaatgacggccctgtttcaaattcttatctagcttcactataaagtcagccagttccgactgaactgactgaacccaaaaaaacgcagcttcgcaaaatgagatcccctggttgcgttctgcccgacgcacagagctaggcagaacttttcctcgaagactgttgcaaccg

SEQ ID NO: 1140 - DNA, 501 bp, Bos sp.
ggctcctgatcaagtgcctgtccacatggaaaaaatcaatcttgaccctctacctcccgtcgtacacaataaaaccaattccagatgtattgtggctcaaatgtaaaagaaaaataatataactttcagatgaaaacgtacaacttctttgtgatcttagaataaggccaagatttcttaaataagtacaatagtgccgaccacaaaaggaaaaaaaatggataatttacactattttaaaggaatttctstccacaaaaagagtgaaagggtaaaccacaggaaacaaaagtaggtatttacaacatatatattctaacaagacctcaaatccataacacttattattaaaaatatctgtaattctacaagacaattcaacaaagcaacccaattttttgtttcagaagacctgaataagcatttcccccccttttttaagactagaaagggcttttgacaaaacaagatattcaaatagtcaattaacatatgaaagag

SEQ ID NO: 1141 - DNA, 501 bp, Bos sp.
ccaaacatccttgcccagcccacctggctgttcccccctcgactgcagaagttcacccgttcccatgaatgtatttccaggttcattttctgacttcattttgagaaaccctggacataacactcggtcgagggctgcaatggatccagaaacccaaactggtgtctgcctccagacagacagggctggcatgtgggctcgctaccagaacctaccacgggagttaatcctcctgcctctcactcacactygggtcacctccgtcctccttgaagtctacttcagtacctattttaaaatacatactcttccccagggggcgccttccacatagaggactgtagttttctgtaataaagcaagaaaaagactccacaccatcaccagatgacggagagaagtgtaaatcacaccaaaaagctaaagggtatggcttccggaggcaacttgagcatcttatatacccagtgagtccaaactggaaggtagataacttacgca

SEQ ID NO: 1142 - DNA, 501 bp, Bos sp.
tgtttttaagaactgaatatccaagagggttacaggatagctgcatttgatcttttgaagatctggcttgttctttacatgaaagacattatcttctgttttcaaatctgggagatacaattacattatccttattcccatttgtacgtttgtttttagaagtaaaaccactctttaataatcactgagaagttaaggtttaacaggcagtatttccttttttatttttcttttctcaacattagcttttrtaacttttcttcacagaactgtatagttgtatattagttagcaggtttggaattagtgttaggtgttagtttagtatgaggttttagatttggtataggataaaccctcctttatttttgttttgcatattcttgcaaaaggttgtttcgaattggtgacctggagtggacaaagtcattgttttcaggtgacttgggtagcacatcccagagacactgcatgaacgtagctgagtggcagaaacaagaa

SEQ ID NO: 1143 - DNA, 101 bp, Bos sp.
tggtgaggtgaatttcatgaagggtaactgtacagctgcttctaacaagayacaaagattataattaacagtttgaattagggtcttttattaagttagat

SEQ ID NO: 1144 - DNA, 501 bp, Bos sp.
gactctttgcaaccctatggactgtagccttccaaactcctctgtccatgggattctccaggcaaaacactggagtgggctgccacagcctcctccaggggatcctatcaatccagtgatcgaacctgagtctcctgtgtctcctgcattgcaggtggattctttatcatctgagccacactttagttaaacatacaatgaaaatttataggctttagatttggatagaactgaattaaagttttgctcamaatcgcttgcttaactgtgtggctctgggtaataaataaggtggaaagtacattttttgatttactgatatatgtgtcaggctctctataaaagattttacatgttttactttatttcacatagaactctcttaaagaggctctatgattatgttcacatataaatgaagaaactgaggcccagagagattaagtattaataatttgcccaagaacaaaaatccactaaatggtagagttttgttttgaa

SEQ ID NO: 1145 - DNA, 501 bp, Bos sp.
aacaaacactcagcacagtcaaaaataaatttaattaattaattaaattttaaaatacattgcacatcatcccttgcaggtagaagtaacctgtgacagttctgaccaatgaaagttggtcaaggtttctgggaaacaaaagttgagggtttctgggaaaattgtacttccctgatatagataacaccccttttatacatttccttcttattccttcctggaatatggatttcatgatttagcagtcagtytgcaactatgaaagtaaagccagagaatcacagagaggttttagcactgacatccttgtgggctcagtcactcagttatgttcgaatctttgtgacccaatggaccatagttctccaggctcctctgtccatgggattctccaggtaagaatactacagtcggtttccatgccccctccaggggatcttccccacacagggatccaacctgtgtctcctacattgaaggcagaacgagaaaagccccagc

SEQ ID NO: 1146 - DNA, 501 bp, Bos sp.
gcagtatggcagttcctcaaacattaaatatagaattaccatattacctagcaattccaaaaagattttgaagaacattcacctaaccataactacataacaggacaaagggagtttggaaatttaaggaaatgtctcaatttttattaaattaatgttctttattatttcaattttctttaaaaagcatgtattttttattatgaaaaaaccgaatcaggcaatggcttttaattgtatggttggatttytatcatatgtagtaaacccaggagaagccctaagaactaaccagagcaagagacttttttttattgaaaattacttgactttggacacagtgagggaaggagaagttgggaggaattgacagtagcactgaaaataaaatagatatgtaaactagacagctagtgggaagctgctgtataacacagggagctcaacgtggtgctctgtgacagcctgggggatggggtaggggactgatgggaggttcaa

SEQ ID NO: 1147 - DNA, 501 bp, Bos sp.
tttttgcacaaaataggtagtttggagttctaagcaatcaagtaaaaatttttcataaaaggtgagttttagaaggaggtcacttagaggacatagtccttgaaactcacattgttagagaatgaaggcttagtggtgtttttcccctgtagttacttctaacaccttccacatcatgacaccagtgaagaaggaggcttttcttttcctaagtgattagtacatacagtgaaccatgacaagtaattatygtgacctttgaaattttaatatatgggaacgttgtcacagtattatttttagacaagtctcctaaattgctttctacgtaatcttttcaataacacatatcctgagcattgttcacccttgaattggttctaaagctgcctgagagccaggctgatatcttactgcaggagggtgagtaaggatgaagaatccccaccagagactggatcaggcagatgaagccgccagtggcaaagctaagctcgattc

SEQ ID NO: 1148 - DNA, 501 bp, Bos sp.
gacatcacatgtgtgaatgagtggaagtcactcagtctttctttgcaaaagtgcccgactctttgcaaccccatggattataaagtccatggagttctccaggccagactactggagtgggtagcctttcccttctccaggggatcttcccaacccagggatcaaacccaggtctcccgcattgcaggtagattctttaccagctgagccacaagtgaaggacatcacatacacatgcattgaaaagtccraggttcttgggacttccccagtggcccagtggttaagactctgctgccaatgcagggggcacagtttcaatgtctggttgaggatctaagatcctgcatgctgcacagtgtggccaaaaaacaaaaattgttttaagtcagatgctctcattttaacagaaatatgtccaaatgtcatgggagctgaaaggtagaagccaatttctggggagagcacaggaagaaataagagcctgggttatttcatcag

SEQ ID NO: 1149 - DNA, 501 bp, Bos sp.
aaagtagactccaagacagaagactttcaatgagacaaggggcagcatttaattttgagaaaagttcccattcatggtagtacttccatatgacatgggagctcaaacactgtgccatctctcctcctctgttgccgctaaatcgatcatgaagagacagaatgcatgaagtcaaaatatcaagagaatgggtgaagagttggtggcagacaatgaagagaggctcgcttgtggaagaagggaggctgacyggcgaggggtgttggttttggaagagaaagctgaagtggctgcagggagaagggggcatcactaaggagaagagggtggaatcttcccagagctctggaactggaggcaccagggacccaggcggggtgatagatgtgggcagaagcacagtcaatgttagaactctctggaaacagcaactggacttgcagagctcctcttccccagccctacagccaggttggagccacttctccagcagggcagaga

SEQ ID NO: 1150 - DNA, 501 bp, Bos sp.
tgggtactgtgaagtctctatagaaggcagagcatgacattagtggaaattagtcaagcagctcatatggttttccactctaagtaccaaagctaaacacagacttttaaagagttggaaggagttattctgtgtcctgattataaactaatcatttaggtccctcaaatttattataaatataaattataatctttcctatgttctcaccttgctctgatcttctaagaactaaatatttgtgagatccraggatataactctcctttgaggcatctcataaagtaattccattactaaggcatatagtaaataagtttgaaaagcccctgtacccatatctacctacatatactataaaaagtccatattgttcattttatatacctatattttcaccaagggcacttattaaacattcaaatattgtatattacttaagattagttttagccaaggaccccctgtgatcagaagttacctgtcataagtattgttttc

SEQ ID NO: 1151 - DNA, 501 bp, Bos sp.
gtaaaacaaaataatgcccagaaatatgttaaacatttgaagaatttagcacagagtcggacacgactgaagcgacttagcagcagtagcagcagcatattataaaagtagacttttaagtttgtagagaaaaagtacattaataaacaataagatagtgctcagatgactggtaaatttttcagggggggaaaagttaaatatctcatgctatatatatttcagatgaatcaaaattaaatctagaaackaaaacataaaacaactagaggaaaatgtaagtcagtagttacctgctatcagtcaaggaagttatttccaggtataaatactaagaaagaatagtagaaacgaaaatgccaggagtcaaaaaaaacaaaacactataaggggcttccgttgtgactcaatggtaaaaaaaaaaatccacctgccaatgcaaaagacgggttcagcccctgatctggaaagatcccacacgctgcagagcaactaagccgg

SEQ ID NO: 1152 - DNA, 501 bp, Bos sp.
ctgctctgtttaaggtagggaaggttttacctatgggcccatccttgcccagttcctcaaccaatcctgatcaggttatctagtcagttttacagctagagctaggttcagaatcaggtgtgtcctgggtgaatccaaattgcagcccgcccttaacgcctgatttgtcttgttatttcctgcatctcagctcttgtggggggacatctccacttgtccagacacactcatgataagattgatccaaaatrtgacacaaaggaatgttaccaacaatgcttatatacactcttctgctatgatcattacctttcatgcagagattctttcttccccaagttccaagaaaagaaaagggatgagatgatcagaagcaccgatgtcaggaaactataccagagacagatgtagccagaatagaaactcagatgataaaaatacacatgtggtggagagtggtcacatggcagtcctccataaactccaaatcacaatacggaa

SEQ ID NO: 1153 - DNA, 501 bp, Bos sp.
ccatctcatcctctgttgccctcttctcctcctgcccttagactgtacttagaatacacagtgttttcctgatttttcttaggctcacagaacttccaggctggtgaataagggtatggttcatgccagaaactcccagggtcttactattcagccagtcctgcccgtgacgaaagcccatgggtgtcacatgaccgatgacgccatcataccaagggccaccttggggccgggcagccttctgacttcastgtccctctgagagttgccagaacctagcagcgagcatgagccccggggcagtgcttctccggcagattctggctgtgctgcctggaccgtagggcgtgtcccttgggacttgctggctcagccctggtcttcatggtcagctgggcccgtgttctcagatgtcagttcacaggctgccttttctggcaagccgggccctcttaacccatcggtcgacttcctttgccacatgtgggtttggctcttcat

SEQ ID NO: 1154 - DNA, 501 bp, Bos sp.; identical to SEQ ID NO: 547

SEQ ID NO: 1155 - DNA, 501 bp, Bos sp.
tttgcaactccatggatagtggcacaccaggatcctctgtccatgggattctccagacaagaacactagagtggactgccatttccttccctagggcatcttcccagatcaaggattgaacctgcatctcctatactggcaggcagattcttttccactgagccacctgggaagccctagacatatttgactacataaaaatctttaaattttatggaaaaagacagccaaacaaaggaaaaagaaattayagacacaatagcgaggggggctgttgtatctgtaatacaaacaacaaaggatttacagcccaatatacaaaaagctcctaaaaactgaaaagaaaaacagttcaatgcaaggttgggggagggaacacagatatagaattcacagaagaaatactgatggccaacaaacatgtcaaaactatggtttttccagtagtcatgtatggatgtaatagttggactataaagaaagctgagcaccaaagaattg

SEQ ID NO: 1156 - DNA, 501 bp, Bos sp.
ttgatttgtgggattgctttctaagttagaaaaatgagatgtctggcatctgagagaaacaaaagccatcccaagctgtcacttgtgttttttactttctcggtatttggcgaaaggttgcagggaaattttttcttttcatgacttctagatttcatgcataattaagaaaaccgtcccaactctgtttattaaggaattcacttgtgttttgtctgaaacatttattattacatttgggatttatcctrggcatattctgagatatcaactcatctggttctttttccctgctggcttccctgcttgcccaacagctgtgttaaaaggtccatttttactgacgcatttgtagatgctgcctgtgttggatatgcaaataccatactctttctgtgctttgtttcattcccctatttacatgcaaaaactaggttcttttagttattggtgcttcatctgtcagtctctgaaagaccagtccttcttcatgtcttcctt

SEQ ID NO: 1157 - DNA, 501 bp, Bos sp.
cttaaaagcacaaacgagaaaagtgtgttaacaagcacgtgtgtggcaattgttgagcacttttggtaggccagccagagtatttatttttgatcctggaaaggactgtttagtaatagtgaatgcgagtgagtccctgttcccaagaaggttatagttttatgggcaaggaaacatgttaggttctctcaggatgcagctgcaaatgcacatttgggggttttcttaatgcagagaagtacacctgcggragtaaaggatacagaccacctgctcagccaggcctcacgtgactgcagcatcgttcataatttatctgcagtgccagtggtcccacagcagctccagcttcattagctatcagaagcagatagttagatttttgtggccacaagcttcactctttcagtctcaaattggccaattgtatccattaccagggagttctcattggctacagctttcacattattttgtgggttattatgtgactgctgtcag

SEQ ID NO: 1158 - DNA, 501 bp, Bos sp.
cctgccaaagcagaagacatatgagaaatgggttcaatccctgggtcaggaagatccctggaggagggcaaggtaaactattatttatccttgtattattgctaggagaatcctatggacaaataagcctgggaggctacagtcaatagggtcgcaaagagttggacaagacggaagtgacgtagtaggcacacactcactctagcattgtggttcagtcgctaagttgtgtctgactatttgcgaccccrtggacagcaacatgctaggcttcgctgtccttcatcatctcctggagcttgttcaaactcatgtcaattttaaaactaccatatctaatatctgctataccaatatgagtcagtggtgccatatcaatatgtgtcagtgataccatccaaccatctccttctctgtcgtcccattctcctcctgccttaaatgtttcccagcatcactgttttttctaatgagttggctcttcacatctggtggccaaag

SEQ ID NO: 1159 - DNA, 501 bp, Bos sp.
ataaagatttagacatattttgttgttgtttagtcactaagttgtgtccaactcttttgcaactccatggatagtggcacaccaggatcctctgtccatgggattctccagacaagaacactagagtggactgccatttccttccctagggcatcttcccagatcaaggattgaacctgcatctcctatactggcaggcagattcttttccactgagccacctgggaagccctagacatatttgactacayaaaaatctttaaattttatggaaaaagacagccaaacaaaggaaaaagaaattatagacacaatagcgaggggggctgttgtatctgtaatacaaacaacaaaggatttacagcccaatatacaaaaagctcctaaaaactgaaaagaaaaacagttcaatgcaaggttgggggagggaacacagatatagaattcacagaagaaatactgatggccaacaaacatgtcaaaactatggtttttccagta

SEQ ID NO: 1160 - DNA, 501 bp, Bos sp.
  misc_feature (1)..(53): Nucleotides uncertain from position to 53
nnnnnnnnnnnnnnnnnnnnnnnnnnnnnnnnnnnnnnnnnnnnnnnnnnnnngagctcttcttatcttcattctatggccaagcacgctggggaggtcggagaccagaggtcaccccacttgcccaaagcatcacagcttgtggataagaactgacccttttagagcaagaccacctgttctgtttgtcctgattcctgttcacttcagctctgtgggcaaagacctcgctgaaaggacaagtctatcckagtgagaccttgatgttagacatacttctcaggttctttttagcagcccagcatccagacagaattttcacttgggaaagtgaaagcgttagtcactcagtcgtgtctgactctttgcgaccctatagactgtagcccactgtagcccttctgtccccggaattctccagacaagaatactggagtgggtcactgtgccttcctccaggggatcttcccgacccaaggatcaaacctgtgtctcctgcat

SEQ ID NO: 1161 - DNA, 501 bp, Bos sp.
agcctgtgtgccagttattaagacatcatttctctgctctgagttcatcttcctatactaggctttgtggtgatggggctggaccctgcaactccacttcttcttggccagcgactccgttagtctctgccaccagatggcgctagagggagagcccaaggttaggagggaaaggactatctttttcctgttttttttctttcctacgagggtcacgccagcctcacttctggtgcagaaaaacaatattycaaattaaaaatgtaatggacacatatgggacattgtacccagtaattaaactaacgttctgctccggaacgcatggtgtatgtgtgctttaattgaccaagtatcaagctttagagcgagtttcaacaaattccaaagaatctgtaacatgcagaaaagattttcctcaccaagatgtaaggtgactaaaaccagcctcatgcattttgtaataataataataaagaaaccactaaaaataaaacaaaa

SEQ ID NO: 1162 - DNA, 501 bp, Bos sp.
caaatatagcactctgataggagatgttgataacaggaaagtttatccttgtataggagctgagaatatatgggaaatctctatacatttctttcaattttgttgtgaacctaaaacttctctataaactaagatctactttttcaaaagctttcaattaaaattttttattaaacataaggattatatttcctttaaaaagcaagtgtttaaaaaccaatagaatgattagtgcaggaaaaaaccaatastaccccacatggctcattctgtctcactcttgagagaaagcctgtcttagttctctttcagctgtgacagaggaaggccctgccaggcaaagtgaaatttcaggacacaaaactgattaaagtagtaagaagggctcatgagcccttaaagtttcaagaataaaatttgaaaaataggtaggaagccatggtattgttggagacctgataggaagagagtgaagctgcatgaatcctggggcaaggattc

SEQ ID NO: 1163 - DNA, 501 bp, Bos sp.
gggaactaccaataaaaccacagggagacgtactatgcaccaacggaccaagtcaagtgccagagaaatacggaacaactgagactctcatacgctgctggtgggcttgtaaatggcacaactgctttggaaaacacttcgacggtatttttaaatgttacacattcactgatcacatgacccaaccattccactcctaaagcaattcccctagagaaatgaaaacatacaaccacataaagatttgcacrtgaatgtttatagcagctctctgtttaatagccacaaatttagaaacaatctaatacccatcaattatgggcttcccaggtggcgcgagtggtaaagaatccacctgccaatgcagaagacacaagttcgatccctgggttgagaagatcctctggtggagtaggaaatggcaacccactccaggattcttacctgtaaaatctcgtggacagaagagactgggaggctacagtccatggggtggcaaag

SEQ ID NO: 1164 - DNA, 501 bp, Bos sp.
ttctctgaaaatctggataagtcaccaaattattttgaaattgaagggtatagagagaaggtaactaatatactaaaatacctgagtacaatggaatgatttttgcattatagagaaaaagcacttacgttaccttagtgaaaagttgccagatagtgactactcagtttccagaatgctgtcacctgagcctgatttattggcccttaaatttttatcattttctaaggggcatttacttaaagaacacrctgtcaaagaatcacaaattcagcattttaaatgtgtaggtaaagtttaaaaacaaaatttaaaaataaataaataaataaatgtgttaggtaaagcacatgtttggggggacctctgcatttagcacaagtacaaaatggggctgcagaatgaaaaaataaagtgtggaattttgactccaaagggaaagggcaaaccacactggtgtctctctccaaagtgaataaaagatctgctctggctgagaga

SEQ ID NO: 1165 - DNA, 501 bp, Bos sp.
ggggggtccagaggaaaggtgtcgtatcccatgttcagtccatcaacacattctgtcagctcttcctaccacatttagcagaatctgaccccttatcatcattccactcccaccacccagatcccccacatctctcgcctggattgtgacaagggctttctgactggtctctctgcttgcacagcaatatttcaagcccagcgttcagagtgaccatttccaaatgtgagtctcttcaggtcagttctctwcacgggaccctgtaatggctttgcttccagctggaataaaagccagaagccctccatctggctgcctgccgccttctgagctctgcccaccgccttctgaggtctgccctgtcttcctcagtcccttccttccatcactgacctcagcagctgtccctgctcttgccaggcgtgtccccccaggccttcgcttccccttgcctggagctctctcatcccaaacatctgcagggtttacccctccattcca

SEQ ID NO: 1166 - DNA, 501 bp, Bos sp.
ttgatttgtaagaatgatagagttatgaaggaagctgaatttatagttctgcaagtgttagggccccacagggaaggagtgggaccctgagaacaggaatgtggaaatctgggtgtatctccttgagaacacccaaacctcaggtcccttttgggtctgtggaatggcaggagaagccgcttttccatggacagagggggttttccattatctggagaccatgcaaagccctgagttcagatagactcatygcaaggtgatctcctcctcaggatctgacttgtttcccttcattgtcttgagaagagctggaagtgtgttggaccaagtaaaaaatttatcattggattatttctgcctttttctgtacacagttgtgtgcatggtcagccatgtctaactctggctcctctgtccatgggatttcccaggcaagaatacactggactgggtggccatttccttctccagaggatcttctcaacacaggaagtgaatcca

SEQ ID NO: 1167 - DNA, 501 bp, Bos sp.
acgacaggatgagatggttggatggcatcactgactcaatggacgtgggtttgggtaaactgcgggagttggtgatggacagggaggcctggcattttgtggttcatgaggtcgcaaagagtcagacactactgagcaactaaactgaactgactgaataaaaattcaaatgcaattattctttgacttagaagttccattacaaatatatcctatttaaatatggccccaaatttacaaagatacacatmcaaggaggttcactgaagcatcttctgtgatggcaaaagtgaaagtaatttcaacatccaaaaacagggaaacgtttagataaattatgatatatttatattgtggactactctaagtattcagaaagattgacagctataaaaggaatagagtgaaacactgcatgtggttaatagtagctatctgcagagaatgagactggttatgagtagttacatgggaagaatgataacgacaattcaacaatac

SEQ ID NO: 1168 - DNA, 501 bp, Bos sp.
tttggctgtgctgggtctttgttgttgcacacgggctttctctagttgtggcaagtgggggctactcttccttgtggagcacaggctctgggatacgcaggctccagtagctgcagttcccgggctctggagcacaggctccgtagttgtggcatgcgggcttagttgcttcacagcatgtgggatcttcctggtcttctgctttggcaggcagattctttatcactgagccatgtgggaagccccctttwaaatttttttccccaatatcttgttaagaaaattttcaatcatatgtaaaagttgaaagaaatttacagcaagcccacgtatacaccccacctagattctataactaacattgtactttattttatttatcccatgtttcttcattgattcagctgctgctgctaagtcgcttcagtcgtgtccgactctgtgcgaccccatagacggcagcccaacaggctcccccgtccctgagattctccaggcaag

SEQ ID NO: 1169 - DNA, 501 bp, Bos sp.
gaagtggaagtaggcttttcagtgcttttgtggtaatccccaaatattcggccttgactttaatccagaacatatggaagtctgaagttgtttcaaacatattttgaaggccaccatcatttgcagtttcaaacagttgattctcttctagcatggacaaagtcagttcacctggcctattcacaaatgggtcgtggatccattccttcccattctgggggtcttttgtggtagaggagtaatgctctttygaaaactgagacaagtgatcatgcatctagctgggagagagaaggccctggctcagtctctttcaaaatctctgctaatgtctgaaacatgtcaaaaacccaatgtccactcatcacacctacgactgcagattggctttgaatgtcagtctctgttgacttgaacatagttttcattctcccctgaagtgactgagttcactgagcaggttgaatatgtcccacaagtaagcaagtttgtgatccattc

SEQ ID NO: 1170 - DNA, 501 bp, Bos sp.
ccaccaggccttgggttgatttttaatccctttgacccttactttttccctctgtaagatagggataattccaggccctgagaggtctgtgaggattcaacgaacccagggtccggcgcttggccagtgcctattaaatcttaacagatactaactagcgccaccgccactttaactgctggctccgattgggaacgtctgtgaagttggagacactgctttgagcctataagtgagccatcttacatgasaacacacaggcacgacacacaacattaggtaattctctcctgccggccacaaatctcggtggagggtctattttgtgccccgctctgtgccagacgctggggatgcaggccttgcccttgtgtggaatcccatgaggacacatatatattaaccataatatcccacagtgccataacagctttagacacttagactcacaaaaccaacccggccacacttggcattagattccctctgaaggctagtgac

SEQ ID NO: 1171 - DNA, 501 bp, Bos sp.; identical to SEQ ID NO: 769

SEQ ID NO: 1172 - DNA, 501 bp, Bos sp.; identical to SEQ ID NO: 880

SEQ ID NO: 1173 - DNA, 101 bp, Bos sp.; identical to SEQ ID NO: 425

SEQ ID NO: 1174 - DNA, 101 bp, Bos sp.
ataacaatatttgaaaagaaagaagtctcagcactgtgtttgtccaggcayaagctttgtgacaccgccataactagtatcatagtgtgttttgactcact

SEQ ID NO: 1175 - DNA, 501 bp, Bos sp.
gttttcctgaacctggacagaggcatgaagcagcctcaatgcaatattctagaggtggtagaacctcagatgggagtgactctgtgcctatgaaactaggaaccatgcagataaaacatgagggtcccagcaaaagtttccttggctgagcttggtgagggtgtgaaggattgtttgatgtactgtcagcagtactagtggttttttatgtctttaaaggcctgtgaaataaggaaaatactccaccacarttgggttagtctctattttcctggagtccagggttcttgtaagatccaagagtggtaatgaagccctgataaccaaacttctcattagccttggtgaaggagtgtaggaagcagatttaattttattcagaaaaattaagaaatataaatgctattgcattccagatgccatggggataattaaggtctgttacaagtcttcaacagaggagcactgaaaaagagacctatttctgttggcatatggatt

SEQ ID NO: 1176 - DNA, 501 bp, Bos sp.
caaggcagaagtggttctcaattatttctattgttaagtttttactaggagcttcttgccaaaaaaaaaaactataaatatgatgtctttatttaagaagacatgctccacagctacaaagggaagcagggcttttcccgcacttgggtaaatgcacaaaagcatctctctatggctgaatggctaactaggacattcccacactgtggaagggtttataaattttaataatgcacagcaacctggaattygtgcaccatctccaagactcctcctgcccactaactgtaagcagatttaataagccctgagatacagacaaggaggtgtgctgattctctgacagtcccctctatttaaattcctatgtaacctttacatttggagaaggaaatggcagcccactccagtactcttgcctggaaaatcccatggatggaggagcctggtaggctaccgtccatggggtcacaaagagttggacatgactgagcgacttct

SEQ ID NO: 1177 - DNA, 501 bp, Bos sp.
ggatgtacccaacacgatagtacaccttttcctttaacttgaggcatcagccaaacctgcctatgagatattgtctctgaatccttcatcagtatcacttcagcatttgattaccgtatctgctagttgtattcatatgatccaaattagtctttgtttacctgaagatgtgcattgtcttttttggaaaagtatatattgtggttttcttttgtacaaaatggattcaggagtagatggggagaatgctstcttcccactgcagacagtccagatccatcacttgacccagcacagcatggcctcagctccaccttgatgagtgagttaggttgtcagtattgaaacttctggggctggagaattttacgtttcccccacagccccctacaggttaataactggcttctaagtatgatgaagcctaagtggaaagggtctgggtaaaagatcagttacgtttgcccagaagagagtgaggagttagattaaattctatgc

SEQ ID NO: 1178 - DNA, 501 bp, Bos sp.
tgagatatgaacatttggagttatgtgtttttgaaagaaaatgaaatgtagatgggtattttgtaccttcaaaataagaaacaaatagcactttctaatatgtttgaaaattgtttcagattcaaatttgttttgcagagtcaaacaagtgttgcttgtcatctttattgtattaattgtttggaaaatgagctaggctccgcagtgtgctctgactcacagcatttgcatcctgtttttttcttatacasttgctcttggtggagggaagactgtcagaagtggtcagcccgaccttactgactgtgggctgcacgtggctgttggccagctaggtgaccgtgttgattttatatgaaatacagtgaaagaaacgaaatgggagccgctgcaactgctgcttccctgtgagctcttttcctttgttgctcagaatccagatggagacagcatctttgaaacttgagaaaatatgacattttcctctgcctctaccttctc

SEQ ID NO: 1179 - DNA, 501 bp, Bos sp.
gtataaatagaataaagtagatcaatatgtcctgacatggaaagaaaataaccatgatacattacatttaaaaaatcatttgtgaaataagatagtgtgatctcatttaagaaaaaataattatatatgttagcatatacatagaaaagatctgaaggaatgtacactaagtgatgaatagttttctctgggacttacaggaccttaactattttcagtatatttttatagtttaaataattttacagagygtatatcagtaataagaggaaaagggacttccctggtggtccaatggttaagaatctgccttccaatgcagggatgttggttcaatccctgcttggggaactaagatcccacatgcagcagggcaaccagagaagcccctgagctgcaacgatcgagcctgagagctctcagagccagtactccacaactaaaggagtctgctgcactgcaactagagaaggcccatgtgccacacagcttttcttttta

SEQ ID NO: 1180 - DNA, 501 bp, Bos sp.
tgcctttcctgtatgaagcctctattgatcacatacagatatagactctgagagctttaacatgaaagctgggtttaataaactgctctctagcttttatttcttaaaacaagacctatgttatattttagcatgcttatagtatcatcattctttaaattggagtctctacacaaaacgttttttaaattagccttcgttccttcatttccaaagtctaacacacattaccactgttttacactagcatrttacatctgatttttaatttggaataatgtgtctttcaaccccatttattttatatgatttgttaagaacatcagtctcatcaaactaattatcgaaggcaaatggcttaccataaaattaatgtactcagcaccccccaagttagttattattcaaacgcaccaattcttttccttcatgtataattagttttagacatgtaaatgaagatgattaaaaataagtaaagagtgaagttatgaaattgat

SEQ ID NO: 1181 - DNA, 501 bp, Bos sp.
catctgtgttcaacattacgaaggtgagatccccggctccttcgttgactcggctggcatgtgtcgatgggcgtgttatcacacaccagacactaacacgtgaggagcggtggctcttataaaagcacgtcacgggggaccctgaccgaacgcggatctaaggcttccgtgagctgtgatgctcggatcgagttccgaaggatggctacaaagtaaccaggcatggaggggaggcacattagagggcagcrtgcttcagccctggagaaggaaggaggccgggctggaagcgcctgcaggtaaggctgggtaaatgtgagggaccagattgggccgggttcctaccatttaattctcacttacttccacaacgactctatagatggcactcccgttagacagatgaggcaacgttatgtgcacaggagagtctgctcagaagccatcatcctaccctttttccttgccatcagatcttgcctttcaccctagaaacacaaa

SEQ ID NO: 1182 - DNA, 501 bp, Bos sp.
aaagaccctgtcatccttttaaagactgtgccctgccccctcccctcctgtttcactgcctctgcctctcgctgtgtgtctggcacatgaacctggttggcagcacctggacctcgcagacctgctccttagcttgtgtccagcctttccctccaagtggctctctgcgggtgctgcctgtgcgcagaagctctcttgccccagcgtctccctcagtgggtctcagaatctttggtcgcctgatcctcacrggtcactctgtagcctcctcctcctgaccacttgccctgcccggacagcggctccccagtcctcctacagatagatggggtgaggtaagccgtccttccctctcccagggagacagggcggtgggtgggctgccttcctcccttgatgccctttcttggggccttccctgcggaggtccctgtgggatctgagaggggcctccacaccccccactccccgcaggttctgctcctcccccaccaccaccag

SEQ ID NO: 1183 - DNA, 501 bp, Bos sp.
  misc_feature (87)..(136): nucleotides uncertain from position 87 to 136
agaagctgatcacccatcagaagggttcgcccagggatctttagacccaaagcgcttccagcagttgggactccattgccatcagcnnnnnnnnnnnnnnnnnnnnnnnnnnnnnnnnnnnnnnnnnnnnnnnnnnaccctcctgaattctagtcacaaacctctctgtgggtcctgggactccttgagtaggaagacctttctttttcttggctgttgggagagagcactgcactgggagacaaaggggyacatccccaccctggcttcccctctaacagctgagagactcaccccgtaagtcaaagactgtgcattgtcttgcctagctctctacttgcaatgaggtcttgcaaaggttggtgtagggtgggggtgtcctctggggttccaaagcaccctatgcccgccccatcactggttctcatctgtggtgtaatgacctgcttctgccatctgcctccacctcttgttctaaggcagcaataagggctcatttat

SEQ ID NO: 1184 - DNA, 501 bp, Bos sp.
tcaatgtgaatgggtactggttaaaacagaatggtaagagtagtgatttttggtatgtgaagagccagaggctttatatgagttggtgcccagagtatagaatgaaatagatacaatatttttcaccactttggctttgacttagatatcatcttccaggggtgttcattacttgaaatactacttgtagggaattcatggcagtccaacgattaggattccatgctttcactgccaagtagggaattcayggcagtccagcgattaggattccatgctttcactgccaaggacccagggtttgatccctggtcggctggtcagggaattagggatcccacaagctgtgcggtgcagcctaaaaaaaaaaaaaaaaaagaaaaggaagaaatattacttgtatatgttaattgaagtactatttgatttgagagtaatgctctctaagcttttcttatccttttggtatcaaagaaagtatgtttgtgtttccttgttaaa

SEQ ID NO: 1185 - DNA, 501 bp, Bos sp.
agctagattcaggaatcagcattttgttgaagccaccaggcctggtctgaaagaggggccaagggaaatggatccaaaggacactgttatccaggtggcatcatgtggtgaagagaaacaggaggcagacccagattccaggcctggctcaggcactaagtcattgagtgactttgggtaggtcaccgcctctttctgggccttggtgtctttacctacgaggtgaagtgattggactagtccctgggtgwtgtccaagggctctaaccatatgaaaatgccccgacgccacaattgcaaaatatcttgtcagaatccagagaaggctgggattccagccttggatccacagagaggacctatccctcccctcacccctttgtcacccacggactccatgccctctgcagccagccagagctgcgggacggcagcctgaggcaggtagcctgccagccctggccagctccccgctccaactgaggtaggagtggggtcggg

SEQ ID NO: 1186 - DNA, 501 bp, Bos sp.
ccctccagagcagggaccggggaggtatacatggattgatcaggtactcagtacagggctatgggcttctgcttagctataaccagaacctcctgccaaaggtgggagcagttctttgagacccaagttatggaggtttctgagacccccctccctcaaaaacctggcttctggctgcttcaagggttgttgttgtttagctgttgtgtcctacctctttgagatcccaaggactgtaacccaccaggctyctctgtgcatgggggtttttcaggcaagaatactggagtgggttgccatttccttctccaggggatcttctcagatcaaggattgaacccgcatttcctgcattggtaggcagatactttaccactgagccacctggaaagccctgcttctagggtactgccttattcttattcactctcttcccctaaagcccattccagtttctatagagacaagggttcctaggttcatagagttctgggttgtctg

SEQ ID NO: 1187 - DNA, 501 bp, Bos sp.
aataggggattaaaaggtacaaactcctatgtataaaattaataagctatattgctcagcacgggcaatatagccaacatttcatggtacctataaatggaatataagctataaaaattatgagtaactatgttgtgttcaccttaagcgtatagtactgtaagtcaactagactccaataaaaagaaaatacaaaaaataacagaacacacgcattggtgttttcctttggtgcctctgtgcaacacttygtggaccctgatgtgcagagggctgacttctcagcctggcccatgtcctagtgcccttctccacctcacttctcatccccttttatgctacagtgaaaaccaaccctgcagctctgccccacacacaccatctttgtttcttgcctttttgcctttgtccaagctgttcctttcagtcactttctcttcattctacttttctctttaaccttttggagtctattagccgacatgcactccatcaattatt

SEQ ID NO: 1188 - DNA, 501 bp, Bos sp.
caatagaggaacagcaggttgctttgggggcacagacttcaggcattgaacccacactagaggggtcagggaagacccctggaggaaggacatggaagatgctctttgaggggtgattaggatttaattggccatgtcagtttgctagggttgccttaacaaagtaccaccagctgagtggcttattcacagaatttaccgtctgcagttttggaggctggaagtgcaaaatcaaggtgtcagcagggtcrgttctttctgggggctgtgaagcaggacacagtccagacccctctctgcttctggggctttgctggccgtctctggtgtcggctcatagctggaccatcccgatccatcttcacgtggtggtctcctgctttcatgcctgtctgcaagtttcctctttaaaaggacaacagacattttggggtagggcctcccaggcggttctagtggtgaagaatccacctgccagagcaggagatgtaacagctgtgg

SEQ ID NO: 1189 - DNA, 501 bp, Bos sp.; identical to SEQ ID NO: 864

SEQ ID NO: 1190 - DNA, 501 bp, Bos sp.; identical to SEQ ID NO: 865

SEQ ID NO: 1191 - DNA, 501 bp, Bos sp.
gaagtgaccagtggctcaggtcgggcttcacagatggtgctagcggtagagaacccacctgctaatgcaggagacgtaagagacgtgggtttgacccctgggttgggaagatcccctggaggagggcacctcaacccactccagtgttcttgcctggagaatcctgtggacagaggagcctggcgggctacagtccacagggttgcaaagagtcggacacaactgaagtgacttagcaaagcacagcacastgactcaggtcaggtcatgggagacaccagaaatggacttttgaaatgaggaattaagaaaactggagaagtgaaggaccacaggggctcagtcgagtaagacagcggagactccaaggtggaaagcttgtaacgtttgcaggccggtctcttcatctccgtggaagctgcagccaaagacggctcagtgcctggagggccagcaagcgtctggactagaagcagctatcggggctgccctgcacgggca

SEQ ID NO: 1192 - DNA, 501 bp, Bos sp.
aaacgacgggtgtacccaagacatgagagtgtgtgtatcctgacaccagacaatttagggctgagatttagggacattatggcctttgtggaacaatgtcagtcacagtagacttttcttatagaaaagaccagtcttggtggaggtctgacttcttggttttccctcagccttgctgcatactcactaccttatcagaaaatacatttgccaggaaaatgtactttttgcagttacttgcctttgcccckgcctgagagctctaatttcagccagtctccctccttcagtgcctgttggccacactgacctccagtttctgccccaggctgatccctgtttcctgtgagcctgcggtccccgactgagggctggaaggatgctgagggccacccacgttcctggaggacagtgtgaccttctcacccccagaattgagacccattgcaatggccctgttacttctaggggatggagcttgggccagagcaaagcttttgc

SEQ ID NO: 1193 - DNA, 501 bp, Bos sp.
gtacagaataacccctgctcgatgcaaccaaagaaaagcccgcacagcaatgaagatccagccaaaagttaaaaaaaaaaaaaaagaggcaggatatctggtgcctttatatcttggagggttcttgagacatgtgaaagaaatgccatttgtgcaatttttgacatagtgtgtccatatgggggactcgggttaaagaactggaatagcctcctggaaggtgcacatgtgcccagcagaggtttggggtkggtggtaattgtccctggtttagattgttaattaccattggaattggcagtttcaggagaatgcaagaggaggcccagtggccagctgggggtgttgatggcacatccagcatcttttaaacgttctcctttggatatgattctggaaatgttgataagtgagttttcttgccattgtcctttagttacagggactggtaaagcagacagagtcagtaggggaagcatttctggggtggagtgtttccct

SEQ ID NO: 1194 - DNA, 501 bp, Bos sp.; identical to SEQ ID NO: 1039

SEQ ID NO: 1195 - DNA, 438 bp, Bos sp.
ttaagcattctactggacatttaaggactttgctgctcaccttatttaagacaacatcccctcccgcctccaccaatactttctgctctttctgcttctgtgttctcctcagcagttatcgctaaaatacctgaggcagggacctgtgctccatttactgctgtattcctggtgccacatgcctagagctgtgcctagtgcttggtgcgcacagcgtcagtagttgggaagcaaaggagcgttgaacaaaygcagggaaccatccatgtgccatgcctggatgttgtctggcacacagtcaatatcagccagctgctttcagtatcattactgtcagcgcgtggctagatgccagaatatgagtatcttctttagaaacatctgagcagttttgggaccttcctgacagtccagtggttaggactctgcacttccagt

SEQ ID NO: 1196 - DNA, 501 bp, Bos sp.
cgtgaggcccccagagggtgtgtggccgtctgtctgacagacgcttccccttgggcccagagggactggtgaccttgtaaaggtagacgtgcgtagtttcatcggttttgaatatagtttccattgatttaataatagtttgcatattccttagcataaaaaatagaagataacttcaatctctttaaaatgttaaaaaaaaaaaaaccctcttggcttaaaagggtttacttggttcgcttacttactcyctgaggtcggcagacatgaggaagctctgagaagaatggggatctggcgttcaaggctggctcaacccctcccctcttagatttcagttttcacaggtctctgctggtgagcatttttcatgtgttttctcatccacagagctggctggcattcagggcagagcaagggtagaaatcttggcatcatgcctcttggttcctcacacatcaaggccgtgtcctcacaaaatgtgcaggaaagggtgttttt

SEQ ID NO: 1197 - DNA, 501 bp, Bos sp.
ttaatactttttaatggtaaaatttaattaaactaaaagtacctcagggaagaataatgtatgcaaacttatcacaaaatcaagaaccatggtgagaaaaagtgagagcttaatgtggatgaattccaaaatatttggcttaagtaacaaaaccaacttattctgtttttcccagtaatatgctgtgtgggtctttaagcagttggttgtttaataataataatcttccagcttatttctccgatcagccygcctgtgacagtccttcattcttggtaaacaccgtgatacaatcagtctgctgcagatgcttctttttctattgccgcagcacaatcatttggggaaatctgtgaaactaatgcaaaatctcacaaagctattcagaaatatggattgaaaatggaaggctggaaaaatagcttgtcatagcccattagcagctacacatgctatttaaggaattatttttcaaatggttcttttttgcacattaaaaaa

SEQ ID NO: 1198 - DNA, 501 bp, Bos sp.
agtattctggcctggagaagtccatggacagtccatggggtcacaaagagtcggacatgactgagcaactttcacttcactttaacagatgaagagactgaggcccaaggtgttaaaccattgaagttgctggtgttactgactgacagacaactagaacccatgtctccctaactcttaactcgctgctttccagatcacatgtgacaaaccttggaagagagcttgcaagtcccacaatccaaggcackcctgtctcccctgtagaacgcagctttctctctgcaaagcagttaggaaaagaaaagacttggtggggaaatgacattccttatgctgaaatgcttatgctgaaggtgcttttacgatatatattttttatgaccctttacttgtttctgaatttaaaatcagggcatttaagtaagggatacttgtgatttttacttgtttgcctcctattagtttctttgaaagcattttttttttttcagtgtagac

SEQ ID NO: 1199 - DNA, 501 bp, Bos sp.
cattttgcagatattaattgcacaactactcactgtgttaggcactggagaacaataatgagtaagatctagcctagtctttgctttcatagagtttagtcatgagataaacaagccagttaaaagtcaattataacttcacacctacaaaggtggctgtaaccttctaaaacaaaacaaaaggaaagaaaaaaaaaataacaaatgatagttaaggatgtggagaaatgagaacgcccatacactgccakcaggaatcgtaacacgttactgctgctgcggaaaacagagctaccatacgggcttcccaggtggtgcttctgggaggcccctgcctgccagtgcaggagacacagtaagagacacaggttaggtccctgggttgggaagctcccctggaggagggcatggcaacccactccaggattcttgcctagagaatcccatggacagagtctgggggactacagtccatggggtggcaaagagtcggacatgact

SEQ ID NO: 1200 - DNA, 501 bp, Bos sp.
ttttttttcctctcttttaggttgatgttccccagttctttaggagtgagccaactgaaatcgacatcatggaaagttcccaaacattgcatttggaaactggaatttatgataacgacccctggttcagggtccggagagagtctggggtttattttaacccaagtctggaagaaaacaaacagggcattatttatgcttccctgaagcattcggtcattggaatgaacccaagacaggcaacacatgtrcaagaagcacctacggagtatgcgaccatatgtgtgaggagctaaatccggtcctgatctcccaccagtgatcagcaactgatctgttagtcagcaccactactgaagaccaacagaaagtcaaacagtggtccttggcttgagaaatttcactttcaggaggttcacctcagtgcttgggtcttaagcatccacaggacaaatgactaaaatttctcccagaaacttctttgggacttttttatattta

SEQ ID NO: 1201 - DNA, 501 bp, Bos sp.
tgtatataccgtcctgcaccttcctccttctgcattttctgtgcttacacagcactcactcactgcttcctccttgctaacagagctccaattttgtgtggttcttttccccaagcccacccatgggacccctcatgtgccttagtgaaggtaaatttcacctccagacctgggaggtggttggtcagagaatgacccatattcatggccctaaatcagttcagaaattggcatgagacccaaatcggatyagtgagcaagctgagaagtttgctgggccctccagaaaaaaaccttaattttcttttttcatttcttttgttaaaaaatatatttatttattttcatctggatacatctcttttaaaattgtattttattgtagttgatttacaatgttgtgttagtttcaggtgtataacaagcacagtgattcagttatacatatagatatatctattctttttcagattcttttcccatataagttatcggaaaata

SEQ ID NO: 1202 - DNA, 501 bp, Bos sp.
tggcaaaaatgtaaatgccgagcagggcaaggtgaagggaaaggtttggggaggagcacacgatggcaaataaaaggcattagattggttcctcaggggtagaggagcccggcagcagctctccattggggtctgggtcaggggtcagcatcttatccttgctggaatccctttgctctttcttgaacatcctttgatgcatcagagggacgaacaagaggattactgccccaacgattgggggtacaccrgcaaagtagaaggccacatgatagtccccaaaacagttgcggaggaggcctgaaaagttaacagagacaagtcaagtttagctttgctctactatacaaagatgttctctgcttcttttagaagccatcaaaatgcctatccagagaatcttggcctgtactgccttgacctgggagcccaactcagtttaaacactccttgatggaagacacaaaacctctattacaaagacaagcagctcctccctga

SEQ ID NO: 1203 - DNA, 501 bp, Bos sp.
cagaaaccatgtagagcgctaaataacagcaaaaataattccagtggcagggtaacttaatgagatgttaatgtgcattttatcattatttttcacttctttttttgtgtcttcctaattaaagaccacataggatcaaaagatgaaattaacagatgtgtattactaggttttgcttgtgaaaaactgaacaaatcaaggaagataaactatagtgagacatttctagtttagggcactgtttgaggtckgacctctcactgtctcaaggaggcatctgggcctgaaagtaaggacttactgatgccgctggaaaggcttgatccgtgacactaaagctgccaacctcagtgaagtttcttgtgtgaggatggcaggtaagccacggagccgttcacaaagaaaccacctgatgtttgatgagaactgggcagtgagcagtgtggactgaagttaagagagttgtccccagcttgaaatgtgtatacaacaaggtgacct

SEQ ID NO: 1204 - DNA, 501 bp, Bos sp.
atacacttaaggacttgcttaggtaccttacatatatgagtattgatagatactaaatgctttttgtttgaatcaggataaatagaactgaatttgttttagattgtctaatttctctaccattacaggggggctaaacacattcaaatcacttgttttacaacttggacatacatgcataggcagatctatctatgtatttcatttgaactacaggaaatgcttctataacaggggtctccaaccacaargccatggactggtatttgtccatggcctgttaggaacctggccgcacagcaggaggtgaatggtgagccactaaacttcatctgtatttatagctgcttcccttcactctgattactgtctgagctccgcttcctattagatcagtggtaacattagattctcatatgagcaggaacactactgcacttgaatcatttcaaaatcatcctcacactcctctcagcccatggaaaaattgttctctatgaa

SEQ ID NO: 1205 - DNA, 501 bp, Bos sp.; identical to SEQ ID NO: 10

SEQ ID NO: 1206 - DNA, 501 bp, Bos sp.
aacaggcacagccatcaggtaaacagcaaggaggcacctcaaaaaccagagttgcatatgatccagcaattccactcctggaaacatatctggagaaaattaactcaaaaagatacatgcaccccaaagctcatagcagcaccatccacaatagccaagacatggaagcaatccaagagtccaccgacagatgaatggacaaagatgtggaaacacacacacacacacacgatgctactcagccataaaaratgccatttgcagcaacataaatgaaccagaggctgtcatacaaagcaaatctaacagagggtgaaagacaaatactatatatcacttatatgtggaattcacactatgatacaaatgaactcatccatgaaaacagaaacagactcacagatagaaaacagacccatggctaccagagggaaaatgggtagcagagggacagattaggcattcaggactagcagacacaaaccaccgtatacagacaga

SEQ ID NO: 1207 - DNA, 501 bp, Bos sp.
ttggcaataaggagttcatgatctgagccacagtcagctcccagttttgtttttgctgactgtatagagcttctccatctttggctgcaaagaatataatcaatctgatttcagtgttgaccatctggtgatgtccatgtgtagagtcttctcttgttcactatgcataataaatctgttgtctgaatatttgaaatccataaccagagtgaagacttatctgataaatatgcaagacccagctcaagagsaaacagtggggcaaattctggcatatcatagccacaataatcctaagaagatcctagatacactatggaacataatgaaccagctgaccaaatactacgggtgtcaatttggcactaataatctaaataaataaaagattcacacattagaatttggtatatgctgagaagtatttatgttgaagctgaaagacattccactgctcttgttatctgatcaaaaatcttctctggctccaaaattcatcct

SEQ ID NO: 1208 - DNA, 501 bp, Bos sp.
cttctgcatcagtcattggagaagaaaagtaaattatcttgtatttttaaatgattgaattgcattacttcttttttaaaaatatttatttacttatttatctttggctacactgggtcttcgttgctgtgtgcaggctttctctagttggtggctagtgggggctactctttgttgcagaacttgggcttattgcattgatttctcttgttgcagagcacaggctctaccttatgggcttcagtagtacrgtgcatgggctagggttccacggcaatcctggatagttaaagtctgtacgactttgaaataagtcagggagaaatcacttgcataattccaagttctgatgcagaagcagcttaagtatttgccaaaagtgcagcacaaagtactctcaccttcctctgttccggtaaaaagaaggagtttactgctgggattctttttaagttcctgggccctgagatctgttattatttataatacacttggggtatt

SEQ ID NO: 1209 - DNA, 501 bp, Bos sp.
acataagatttatgctgtttgttatgtaacaaacagagcattgttttaagtgctttacaaatattaacttgctcataatgtgaggatgttaaaatttttatgttaaaatattaacataacctcataatgtgaggttgctcacattcttatctgcctctcagatggagaaacaaaggacttgaatgttcactatcacacagttgctgagtggcagagccaggaatcaaaccaggttctgtagccctagaatygctatgatgcctctctctctgctatgcctttctacatgctgaccctctggccagaaagcccctttatctcctcttcacctgaccaactcccacccatctcttaagttttagctcagatgatttcctttgaactacttcctcaagcctggatttggcacccaattcaggagatttccctggattcctggcacccaatgcaggagatgcaagagacatgggttcaatccctggcttgggaagatcccttgga

SEQ ID NO: 1210 - DNA, 501 bp, Bos sp.
tggtgcatgctatagctgaatgaacttaaaaacatgctacagtatgaatgagctttgaaaacatgtcacaacatgaatgaagcaaatcacaaaagaatacgtattataatatataattataatcatattataatacagttacaatacaattatatgaaatatctagcattgaaaaatttagtgtcttaaaacaacagcaattctacttctcacaattctatagatctgccatgtggttcttctgcttcatrtagcaatggctggggtactgggggtacgggggcctgggaggtctagatgtctcattcacatagctatcagtgggtgatggtcactagctggttgctcagctgaggccatcatccaggagctctggttcttctctacatgggcctatccatatggctgcttgagcttcctcataatatgatacctagttaccaagagcactcccagtcagcaaacccaacgtgcaagtacttaccaagcagccacttttac

SEQ ID NO: 1211 - DNA, 501 bp, Bos sp.
atagatctgccatgtggttcttctgcttcatgtagcaatggctggggtactgggggtacgggggcctgggaggtctagatgtctcattcacatagctatcagtgggtgatggtcactagctggttgctcagctgaggccatcatccaggagctctggttcttctctacatgggcctatccatatggctgcttgagcttcctcataatatgatacctagttaccaagagcactcccagtcagcaaacccaaygtgcaagtacttaccaagcagccacttttacattgtgctgccgattctctacagaccaaagctagtccacatggccaagccccagagtcattgttggaaaggctgaaacagacttgaacgctgagagtcatggtttattgaggatcaccataataacaggctttatgaagacaaaagtgacacatatcgtgcaagttttagagaacaatgaaaaattttcttcctctctgaccagctagttattatggta

SEQ ID NO: 1212 - DNA, 501 bp, Bos sp.
ttggcgctgacatttactcagggttcgtaacccgtcctcatcttttcactctggactcctggcagcatcacccagcaccatctccagcccactggtaccgtcctcttttaagtcttctgtttttcaggtttgtctttcggactgcctcctgggcatgtccacgtggatgcaccaggtgactgacatgtgtttttactggcgagagaatttgcaggttcaaacgtccaaggctactattcttgctggtgcaygcctggattatgagcatcagtgaagacgtctaggcagtgtgctgaaaagcagagacggtactctgcagacgaaggtccctacagtcaaggctatggtcttcccaggggtcccgtatgcatgtgagagctggagccaacagaaggctgggtgccagagaattgatgcctttgaaccgtggtgctggtcaagactcctgaaagtgtcttggacagcaaggagatcgaacctgtcagtcctcaaggaaatcac

SEQ ID NO: 1213 - DNA, 501 bp, Bos sp.
tgtagtgaaatgacataaattgattgacagagtttctcttctttcccccatcccttattctgtccctcgatgttcctggggtgagtgaccccagttctgatgtggccagattctgggacttgttctagtgagtgcgcttgtgaaaggtcatgtgctcatccctcttcatacctgctactttgctccagtctcaagctcagatgttggtgcaggtgtgagttaggtttaggattcgtaacacagctctgtgytgaagtttgagcataagcctaattctttataaaaactggcactttgattcatctttgaatgaagctcatagtgctgaggaaaacgcctggccggaccaaggcaggtgtgcacatcctggaccttaagggaatctgtgttctcctggcaagagccctcccatctctctctgaatgggtatccactctcatgttgtattcaaattccttcacgtcctaatacctagcttttggccgcagggagggtggagat

SEQ ID NO: 1214 - DNA, 501 bp, Bos sp.
cttcatgctgataagactatttccatatacaaattctgtccagagggacaatggaggaagagaagcaaggttgatggagaagaaagagggactatttggttctgcagtaggacaacctagagtagcctgaagactagaagagttaagtagaataacttaactatttggcccctttattgtttgtgactatctgtcaaggactaagaattccaagcaagtaaaagccaacttaggaaagacagcccagtgaygatttttggtggccccaaaaatctgctggcttctttatgaaatatgaacatttactgctgtctgaaaagagtctgatgctgaagctgaagctccagtactttggccacctgatgtgaagagccgactcattcaaaaagactctgatgctgggaaagactgaaggcagaagaagagggcagcagaggatgagacgattggatggcatcactgactcaatgggcaagagtttgagcaagctcaaggagatag

SEQ ID NO: 1215 - DNA, 501 bp, Bos sp.
gctgtgatagaaataggtgtcacaaatttaggtactctgctcaccagaagccctaggacaatatcttcaagacctggagacagagaggggatgggaatccatgtgcctcacccaccacacagctgggtggtaaaggagtggtaagctactacttactaacctactacttatttacttactaagtagtaagtagtaaactacagctcccagcttctggctcccattctagctccacatggccacagtcaagrcctattaatgcagcatcacacgtaaaaattaatctcactgccctaaagttgacttatctagcttcccttggaaaccttggaatttttgtaggttataaccatagttcatgaggagcagcccattataaaatgctaagagtggcaatggaagttcacaccctgagaagtaaggagattacagagccatcaaacattgtgcccactaatattctggaagttatatgcaaacagtccagtactttcataattc

SEQ ID NO: 1216 - DNA, 501 bp, Bos sp.; identical to SEQ ID NO: 86

SEQ ID NO: 1217 - DNA, 501 bp, Bos sp.; identical to SEQ ID NO: 866

SEQ ID NO: 1218 - DNA, 501 bp, Bos sp.; identical to SEQ ID NO: 376

SEQ ID NO: 1219 - DNA, 501 bp, Bos sp.
tttgcttgtgaaaaactgaacaaatcaaggaagataaactatagtgagacatttctagtttagggcactgtttgaggtctgacctctcactgtctcaaggaggcatctgggcctgaaagtaaggacttactgatgccgctggaaaggcttgatccgtgacactaaagctgccaacctcagtgaagtttcttgtgtgaggatggcaggtaagccacggagccgttcacaaagaaaccacctgatgtttgatsagaactgggcagtgagcagtgtggactgaagttaagagagttgtccccagcttgaaatgtgtatacaacaaggtgaccttcataataaccaaggtgggatttttctccaacttagagggagaggggtttacagagagacttaatttgattttaaaaaaataaatagaacatttcttgaactcttaatttgagtgactccataccctcaacattcatatttattaaacttctactgactaggacctttatg

SEQ ID NO: 1220 - DNA, 501 bp, Bos sp.; identical to SEQ ID NO: 548

SEQ ID NO: 1221 - DNA, 501 bp, Bos sp.; identical to SEQ ID NO: 11

SEQ ID NO: 1222 - DNA, 501 bp, Bos sp.; identical to SEQ ID NO: 140

SEQ ID NO: 1223 - DNA, 501 bp, Bos sp.; identical to SEQ ID NO: 12

SEQ ID NO: 1224 - DNA, 501 bp, Bos sp.
caagggccatcctgtgaatagaaagggagtaaaggaagaaccttgggctttgacattatccctgggttcaaaatatggcattattctctagctctgaagccttagaaaagtgattcaagtttcagcatggaaaatggggtaataaagccaaaaatgcacaatacctagttcatttattgtgagacttaaatgaaactatgagtttgtatcagctaggaatgctttcagttgcaagcaaaagaaacctaatrtcggcttaaacgattggaattaactttcttgcataacaagaaatctggtggtaagtggctgctggcatttgtttagttgtttaataatgcaatcaagaatccaaactctctgtatcttcttcacttccaccctcagcatactgacttttcattctcatgcttattgtatggtcacatgacggctgccagaaatccaagcattataatatgtgccctcaaggaaagattgaaggggcagttttggtaatgg

SEQ ID NO: 1225 - DNA, 501 bp, Bos sp.
aaggcagaggaccaaaatagtcaatccaaaataattctggaaaaggatacccttgaaggagtcacaaagacctaccacaaagctgcagtattaagacagtgtggcgtgggcttcagggcagcatagatacatagattggtgggagaaaacagggcgtccagcaatagactacacagacacgttcagggcagcacagatacatagattggtgggagaaaacagggcgtccagcaatagactacacagacacrgcccagggattctgacaaaggtgtgaaggccgtcaagagacaaatggcagtgttttcaacaaatggtgttgggccaactggaatccatatgcaaaaagcgaacctcagctgaaacctaccttctagataaagtgttagttgctcagtcgtgtctgactctttgcaaccccatggactgtaggccactaggctcctctgtctatggaactccctaggcaagaatactagactggatagccatttcctcctc

SEQ ID NO: 1226 - DNA, 501 bp, Bos sp.
cccctcagatttaaacagcccttacctcctaagaagcatagcagttgtattaaattactggttctctgagtttttgatttaatgaacaaatgcaatttgtcaaaaataaacacctcatacaaacacacacacacacacacaaatatggagatcacataagtgttgataatattcttttaaagatcatttctgataaaacatttaccatagctcaattggtaaagaatctacctgcaattgaggagaccccrgtttgattcctgggtcagaagatccactggagaagggataggctacccactccagtattctagggcttccctcatggctcagctggtaaagaatctgactgcagtgcatgagacctggtttcaatccctgtttgggaagattccctggagaagggaaaggctacctactccggtattctggcctggagaatcccatggactatacagtccatgggtcacaaagagttggacacaactgagcaactttcat

SEQ ID NO: 1227 - DNA, 501 bp, Bos sp.
ttctctcccctatgtttgcactttaaataacaggtcgtttaatgttaagtatgataggtgcttggtatgatcattatagatggctcagtggtaaagaatccaccctcattacaggaggcacagaagacatgggttcaatccctgggttgggaatttcccctggaagaggagatggcaccccactccagtattcttgcctggaaaatatcatgggcagaggagtctggtagactgcagtctatagggttgcraagagtcagacacagagtgactgagtgcacacatgcacattatacaagtataaaagtattttctactaataatctggattacttggtgatcttactttttgaagctatcagtgttaccaaaaactaatatcacattttaagtatgaatctaaatatcctctaacatttgagaggatcatggccacttaacagatgtctaaatacttaaaagctataactcaagctagaaatactaaattatgttctatcc

SEQ ID NO: 1228 - DNA, 501 bp, Bos sp.
  misc_feature (487)..(487): Nucleotide uncertain in position 487
ccagttcagagaaagagggggagttagagaagctgctggaaaggagagagtccccagctgcagagtcagacaaactgaccaaaaaagaggaataccgtatggtctcacatatggaacctgaaaaaaccaaactcacaaaggggagatcggattaccagagacaagggataaggaggaggaagaatgggagcaagctggtcaaaaggcacacatttccaagcataagatagataagccctgaggacgtacarcatgatcactgtagctaattccactgcaaattgtacaggaaagttgttaagagagtagatcctgagagtctcatcacaaggagaaatttttttgttttcttttcaggtaactctctgagataatggatgttaacgaagcctattacagcaatcatttcacaatatatgtcaatctcatcatcatgctatatacactttaaacttacccagcaatttatgtctactatttctcaggnaaactaggggaaaa

SEQ ID NO: 1229 - DNA, 501 bp, Bos sp.
tgtgttttaatgcagaggtgcccaaggggatccacagaccagagctagtcagacgtttgttactgctccattatatataagtacaaaattgcgagtaaaggcttagaagctttcagtaacttgaattgcttcaatatcccagaatgggatcagtaggcttgtattttgcacactttttcatttcatttttctagtatttaagttttcatatattttacaaaactattggtccagggcagataacagggggmaaaaatggtcctttaccctgaatttaagaaccacattctagagagcctccatgcacttatttttaaggactgagtgcctataataaatacaaccagaacatgtaacatgttaatgagaaatgattccttaaagagttaattctttaaaaaaatattttgatgtattgtacattgactatgtcatattgagtgcttccatacaggttagttcatttgcacaaaaacattctggggttggaataatagtaat

SEQ ID NO: 1230 - DNA, 501 bp, Bos sp.
tgtttcagttaaaaccagcctgacatttctggccaacttctatatacagttgccaaaaacttggcctctgttcactggtgccgaatagaaaagtggagactgaactttggaggagcagaaaagagtagctttattattttgtcaggcagagggggccacagcaggctaaggccctcaagattgtgccttacttcctgggaaacaggaaatggtcttgtagcttcagagtggaaaacaggctgtcgataagsatcgggactgatgtagtcttgcattcttctttcctcctagagacattgagatcattagggctggcggcaggtggttccagaacaggttctggtggtccttgaggtcatcattgtgtgaccttccttctggcatgaagaatactcacaaagaaaaggagtgttagggagtgttgtcttcaagaagtaaacattaggtacataggacaactttggctagaaagcaatcattttcagagtacaattaagcaag

SEQ ID NO: 1231 - DNA, 501 bp, Bos sp.
ctgtccatggaattctccaggcaaggatattggctgggttgcgttcccttctccatgggatcttctgacccagggaagatgcagggtctccagggaagacccctgacccagtgcaggggtctcctgcattgcaggaagattgtttaccttctgagtcaccaaagaagcctcaagaataggtctcaagtattttgagaaatgctagagccatttgaataaatgcccagtccctaatggtgacagctttgagrggcaacgttcacttggatggatactcgtggtcttattgctttgtcatcacccatttatttgtccattcttgctacacacgtattgaacatcgattatatgttgctaaacagctgaataaaactagatcacaatcctcaagacaaagaaccagtagcaagacagtgggacgtgtgctctgatgttggtaggaagaagtactagggacattagcaagggggcacccagcttgatctgtctttggtggggatg

SEQ ID NO: 1232 - DNA, 501 bp, Bos sp.
caactaagcaaatctatgcaaaaggaaaaacaaggatccaataatgtagcttacacaggcccttggatctctattattctactcttatactcaaaaagaaaaaatgtatagaaattgatgaaaattggctcatgttctgtttttaaaaggagagctataggaagttaaagcctttaaagccaaagacagaattcacacaataagctccttacattacctttttctccagggaaactgcaagccatcctatkagattggttggagcttatccagattctcaaaaggaaagacctgctgaatatgaagcttcttaaagttgcttgcagtcctcaggtctgatatgcttggaatgtccttgagaagaaagaaagggcaaggctcaatataatattcatggtgagatttgacagaaaacaacagaattctttacagcaattatccttcaattaaaaaaaacaattttttttaaatgctgagaaaacctcaacaataaaaaaaaaa

SEQ ID NO: 1233 - DNA, 501 bp, Bos sp.
ggcaggtcaagtacattaatctatagctgcagttaacttattaagaaggaactgaggcaggagagtttccttaattagaagggaaaaactgaagcagatagggcgggagagggcgtccagatgagcgcctcaggctggggctgagtgcgcctgcgcaatgcgcaggatcctgtgcaccgtgtcttggctccgctctctggccccaggagacgcgcacagcagccatgaacctggctgtcatatgtttgcastgggttgtatttgctggtaggaatccctgggacaccctgaaagatgtgagatatagaatctccccagtcatagctcagaaatccatttgagggccattaaaaatagttcttattcaaaggagggggccacattttgtgaacctctgctaaggagtagtaccccgactccacccgccccacccccattcccagatgacaccccagaacctatgaaggcaggctggggtccaaatttgtctggggaggaaat

SEQ ID NO: 1234 - DNA, 501 bp, Bos sp.
aaaagcgatcaatcactttccttgcagagtgtctgactaaacgaaggttctggttttgaggttcaccaggcccacaaagtggagaaggaaatggcaacccactccagtgttcttgcctggagaatcccggggacggaggagcctggtgggctgccgtttatggggtcgcacagagtcggacacgactgaagcgacttagcagcaggcccacaaagatgcctgtgaacttcagagttccgtcattttaaagmtgtggtcagccagtgacttggaaagtcctgccgaatgcaaactgtgacagggatgctaacttcctaggaatcaaattaaaacagaaacacctttataaatgcaccagttctcagaaagatttacatcatagatacttcataactatagcgattttgattctgaaataaatcacaagggtgtgtatatatgctgttttaggatgaaatggtccccaaactgttttcatttgctatcgttatcagaacatct

SEQ ID NO: 1235 - DNA, 501 bp, Bos sp.
ggtcaaaagaaatggccagagactgccaaggctgaagtgatgtcaccttctttgcctgcagtgtgacaaggcagtgatatggcactggggacatgtcctgtccctgctgctgcaggtgactatctgcctcctggagagtatcttctatcccttatggggatttgaaaaaaaaaagacatttctggcttggtattagatagttgtttccaggattcagtgcccttgggtaggtgtcagaacttggagattayctgatcgtgtgtgctttgactgtagttcaatctctaatatagaaatttcacattcgaataacctaaagctacgatgaggatatgtcccaaatataatgcttgtctcaaaaatgttttcgtcagggcataaaaaccataagaaaactaaaatctttgttttagatagaaacattaccaacaaatgtttccaaaacagaaagtaaaaaaaaaaattgtacatgtatggccaccgtaatagtgaggcaggaga

SEQ ID NO: 1236 - DNA, 501 bp, Bos sp.
cagctaaggaggtaaagtgaattatcaaaagtggctaggcaaaaatcaagaatgtatttagttaatcattttaataatttatcaggaagaagagagataaaggaggaatgcattttgagcattaagtacaaatggatgaacatcatgttatacacccaaacgcctacatttaattcaaacaataaaacaatttatgtgtccataccatccactagggaattgagagatgcaaggtacagtacaaaagaatragcaggggaaacttctgaaatggctgagtaaggagctcaatataactgtccttgaaaaacaacgataaatggacataattgtcaaagacaactactttaagattctggaaatagatcaaatacatacaaaaaatttagaaatgtttattctggaactactgtaaggatagtagggagctctggtgtttcagctataggagggtcttccatttctccccatacaactctgttacatggaatacagggcagg

SEQ ID NO: 1237 - DNA, 501 bp, Bos sp.
gggctaagggagggactatgcagtcgaagtgttcaatccctgcgtggggaactaagatcacacatgcctcatgacatggccaacaaaaataaagaaatgataagaatcagggagaaaagaaggcatctgtcttcaggaactaaaagataacagagaaatatctgaaaatgttttctagcacccaagtcaggcagcaatacaaactacatttgaaatttctgcctcagatactgtaacgagcagcaacagaragaacttgtcagaatagggtattgctctgtcattctgtccacaggactgacagacacgagaagtttggattgcaccaataggtgcccagaaggacagctcttaacaacaagcattttatcataaacactgtatacatttcattcctgctagtgagctttacggctaatgtaatataaactattctttgagccttacttctctgagattccaaaatagatttgtgaaaattcttgattttttccaatgctg

SEQ ID NO: 1238 - DNA, 501 bp, Bos sp.
aagatgggggagggagtttccctgtttggggtgggggcaccttgtcagcatttcaacgctttggtttgtttacagggtgctggatgtctgggttgtcgccttggcccaccaggatgatctgctgttaataaagtgtttgtatcgtatgtaaacctgaggttttgtctgggttgtcattagatttccaaaatccttctgtggggcccccaggtggtcactgacccagtgtactctgaaaatggggggtgttygccaacaaggcattttctttgtgaggcaggagaaccatgtgtctatgtacacctccaaaacaggacaagatgagttaggaaggttttattaggtaagaagcctggaggaatgggtagactaggggctgtgtcactccctcagctgcctcctcaccctgtgtggttcaagctgagcctctgaccacagacctctgcccagagatcaagacctgactccgcctccccgacccagatgtgttaggccagtcac

SEQ ID NO: 1239 - DNA, 501 bp, Bos sp.
gactagtttgatgtgagctctgacaacttcctgtacactcaacctagttttagtcttgcccttctccatgatatttgtgcaaattccaaattcaggggcattagcactttgtgggatgagtcattgactatttgggggaaggagctgatggataaatatttctccttcctctcctcaaaggagcaatacacttgcctgaggtgagtagtcctccttgaggataactctccagaccacttcatgactgcttytaatgctcttatcctccttgttgtttttcagtcatgtccagctctttgcaatcccatggactgaaaagaatgccaggcttccctgtccttcaccatctcccagagtttgctcagactcatgctcattgagtcagtgatgccatccaaccatctcatcctctgtcatcacctccccctcctgcccttaatcttccctagcatcagggtcttttctaatgagtcaatcttcacatcagacggccaaaatatt

SEQ ID NO: 1240 - DNA, 501 bp, Bos sp.
gagaaaaaattataaaacagacatacagagaataaattttagtttcaaaagccaaggctgcaaagtaatgaatatcttgataaatgagaacaatcctctcaccctggatagtaaaagattttcccagtaagaggtgaaataggaaacaagaaataataaaagagggtcagagacctataggactcagattggaaaggatatgtggggagacgacatgaggaggaacacctgttgtcaacagtcagagactrtccatgtcccattgtgacacagcccagagctgtggagaatgtaaatcagcacttgtctgtccatctcaatttgaaaatacaggtggcagagtctatgcttgccatctttattctggtcatctagaacggttctttccttcctgtagtaaatattgcttattgattactcagaagttatgtctacttgtgccctctggctttgctctacctaaaaggcactaatatttgtgctaataacacaagctctttt

SEQ ID NO: 1241 - DNA, 501 bp, Bos sp.
agttggtgatggacagggaggcctgacgtgctgcaatctatggggtcccaaagagtaggacatgactgagcaactgaactgaaattttttctttctaactgccccctatgttctgccaggccagcctcagaatatctccaagagcaaatggtaccaggtcttcatccaaagagaaaactttaaatctttaccaccaagagttgggtctctgagtacactactcattaaccaactcactctctcatatccamttgtagcacatggtgggagcttttctagtatcttcgccagttgacctccaagtgtgaataggagtatggggagaggttcagccccagaacccctaagctggtaaggagcaaaaaatacctccgtaaccatctgctcaaattccttttcattcctctcccttcaacctcctcacttccctgaaacaactgtagaaaagaaccataattgagggttaaaagggctctgcagaaactaacacaacattgtaaa

SEQ ID NO: 1242 - DNA, 501 bp, Bos sp.; identical to SEQ ID NO: 578

SEQ ID NO: 1243 - DNA, 501 bp, Bos sp.; identical to SEQ ID NO: 1148

SEQ ID NO: 1244 - DNA, 501 bp, Bos sp.
cggtgaccactgtgagaggaacatggacatacctgtgttcagctcccaggagcgcagtgcggacaggcagagggaagagagctgggtgtggacacttgcacaaggtgggcagggagagaaggagcctccaggggcagaaactcggtggagaaagtcaaagaggattgaggtggacagagggttacaggaccaggagaggaggggctcggcgaggagaggcctaggtgggacttgggaagggaaacaacatyggtgcccaaacactcaataaatgataccaggaggggctgagaagaagtcatgaaactgtgaaatcagggctgtttgaaagtacctggggcttcccaggtggctcagtggtaaagaatccacctgccaatgcaggagacgcgggttcgacccctgggttctggagcttctggagaaggaaatggcaacccgctccagtattcttgtctagaaaattccatggacaaaggagcctgataggcaacagtccat

SEQ ID NO: 1245 - DNA, 501 bp, Bos sp.
agatgccaggctccaggacaagagagagactcagtgctgcccagcgggccgtgccaccttgcaaccactctgctcagctgcccagtctcttggcctccagggaccagcagaaggtcattgtttgatttttttccaccagttaggccttatttgagacccactgagacagtcagttgggtttgaattcactacctccctgccccaatcgcttcttggccttttgtctgagaccaagtgtgaattcactctcyggattggtttgtggcctcttcaggagacgagaaaatccataacgaaaggccattaagagagacagaagaagagagggtctctcttcttccccgggaccgtgtagatgcccagagcggccatggccgtgtggtcttgagccggaggacaaagccgtcttgcagaaccaatgagatcgtgagaacaaggtcagaaccttgacaccccatctggagcctgccctgctctggtcttctggttatgagatgtctg

SEQ ID NO: 1246 - DNA, 501 bp, Bos sp.
  misc_feature (133)..(182): Nucleotides uncertain from position 133 to 182
ataattatactgattagcccctggcaaatctgatcaaagaataagagagcgagcactaataaccagcatccggtgtcagtaatgacaaagggaacatcacagcaggattgtatagaaattgaaaacacaatannnnnnnnnnnnnnnnnnnnnnnnnnnnnnnnnnnnnnnnnnnnnnnnnnaagaattgaaactgacaaatccctagcagagcacagcccactgaaactgacagaagaggacaaagcatsttaccactgtctcacacccatcaaagagattggattcataacggaaaccttcccatggagaaaactccagccacccaagggccttcactaacgagctccactcaatacttaaggggtgatgccagtttacacaaacacttgtagagaatataaacccatctcaactcattttatgtcataaggccagcatcatctctgtatcaaacctgaaacaaaacttacaagaaaattacagactagtatctcccat

SEQ ID NO: 1247 - DNA, 501 bp, Bos sp.
tcaacaaggatgaatgatgaccatcttttttgaatcattttatctataaaagtcattaaattatgcatgtattacttaagataatacttgactgatgttgcagaatttaaaaatatactgtcttccaattccataattattctttcctatcatctttcagcaactagttttgctgatgaaaattatggtattagtatgacttccttgactttattttatagtgaccttctctttccctgtctctgtctgtytgtctctctcacacacataaatatacatgcatcttttaaatttcaggctcccagacatttattttatcttataattctaagccattttgtttccttcagttatgaatatttttatgacataattagttcagagattttatcttatctagtatgttctctcagaacctcttattctgaaatactgagccatctgaatttaccatcttttaactattttaaattcactatatatgaaatggtattatatgta

SEQ ID NO: 1248 - DNA, 501 bp, Bos sp.
aattgcaattgcataaatctacagattattcagagtccatcatgttgactcagaagacaacatggagttaaaagcaattaagacaagtgccgtcaaaagattgtaaaatactgaatgaagtcacattgttaaagcagaagtaaatcagggagaaagttgtaaacaaagataaagccaaaatcagagcaaaataaataaataaaacaaagaaggacactttctaatgatacattagtagagatcgcatggcygcagattttaaacacattggtagatttttttttttttaattgaactctcagcttaaggaagtcatatcaagtagaaggaaaaagatagatattacctaaatgacatgacttatgagacaagtattattaactctataccagaggatgccagagggtgctgtcattattatgtaaatatttaaattttgtaaaacacttaaaaacatttttttaaattatgtaagatacttactatttacaagtgttcatg

SEQ ID NO: 1249 - DNA, 501 bp, Bos sp.
cagatcctcaagctgggcttcaggagagctcagcctcagggtgaactaagaaaatggattttggagtcaacagtctcacttccctcatgtgcaaaaggaggacagcagtgcctttcatatagagttgttaagagaatcagatgagaaaatgtccttctagtcagcatctaatcactggtagcctttaccatcggtatttagtcatgttcagtctttgttatcaatactcatctcctacccatctcagagtscatccattccttcattacacccctaatccctctaaaacatcaggaaaactgacttccctccctcatccagttaactcctgacttcatttctgaatctcgagtaattctggcagcacaggagcagctgataaagactaacgctgcactgtttatgcagctctcctgcagacctattaactcagcatcttacaagctgtatcctgggtcgggagcagaggatagaagggtaaagggagagtgccagtttctc

SEQ ID NO: 1250 - DNA, 501 bp, Bos sp.
ctattttggccatctgcccaatttttaactttgttttaaatttctttgttgttgagttttatgagttgtctgttttagatgttaagcccttgttggtcacatcatttgcaaatattttctcctcttctgtaggttgtcttttcattttgtttatgaaatgaaaggtgccttatattggtgtggtatcaattttgttgtacatgaatggtgaaatgagtcataatatctgtctagattcaaagggtggaaaratagacatctcctggtggaagaagctacgatgtattatagccacttttacaatctagcagtctatccttcagaaaaaattaccatttcatccacgtgtaagatcccccaaatctcgtctcactatggcatcaggctagtgtggaatcttgtgatctaaatcagatcagatgaggctcctcagagcttgtggctttctagatcatacattgcttgtcagtacacccagtaatatacatgattgggcagaca

SEQ ID NO: 1251 - DNA, 501 bp, Bos sp.
gaacttagaagggtgtgctctcattctttgccagagaagacaaatgaacacttcctatatttgacagttctcttttgttctttaagaaaaaattttttgtttttattttcaggaagattccttgtgtgactcaagattttagtcagctgtgagtagcagtaccattacattgaaatcatggagaactccaggatcctttggggagcactgagaatctatttttgaacttctttcaaaaacacagctgaagrttagggcctcatattcagaatagaaaactgcttttggagaaggagtatttacttaaaagaatggccctgaaccttctcctctctggattttatcaacgtctctcaacaggggtgttgtgtttatctgtgtgtctaaaccccacatgttcacttttgtttaccacactgatgactgctctgcgacacagtcaggtgtctctctgaatagcctaacacaggcgatgacaactgtgtttaatgatgactcact

SEQ ID NO: 1252 - DNA, 501 bp, Bos sp.
aaaatgggtcctgtatgtaaaactccacgaattcccagtggcatcctccaggctccgttcagatgattcccactcacacaagccacacatctggccataccaatgtcccctggtagccactgtcctggtcaggagcataccacatcccagaccagtgacccgaggactgccaggcttccacgttctgatataccaacgaattaatagtcatgggccacatcctccaattctacacatgcaacaagattgarccacagaaaccaatagtccgaggtggccagattgagggatgacagcagcagcctcagactcccctctgtgactattcttctggacaacagccctcagccaggaaaagtccttcccacaagacagaagaagggtctgggaaagcctgtcctcctgatccttaaggggacccgccttcccctgacatattcctgcagtcctgttttatctcttcggttgaaggtaatgattctcttcagtcggcaagcacag

SEQ ID NO: 1253 - DNA, 501 bp, Bos sp.
gaactgcttcctctcttcatgctgggagataagaaatctgggcatctagctctgcctgcctgcagagatgggccaaagtgggtgagatgctgaggactctgagagtacaaatggtggatagtcctcctgccctagaatgaagtagagtaaaccatacagctggtgtgttaagagcactggctctggggccagactaggtgcccggacactgccacttgctagctctgtgaccctgcataaatcactttacytctaggatgctcagtttccccatctgtaaaatggggatgatgatagcaagacctcatcagattgttgtgagaactacatgggttcctagaccaggtctggcatgtggggagttcagtaaacatcagccaggatggtcagcagggctggcttcacagatatgcatcctctcaagtctcacagagccctgctcccagaaagactgagtttaatgcttttcggtcaccatcttgaaagtcttaatcagttttt

SEQ ID NO: 1254 - DNA, 501 bp, Bos sp.
atgctttataggtgaggctcatgcagggaacccaattgagaatccgtcagcaaactcataaaaggcaaggccttggcctgacatcaaaagtcagaacacagtgtctactagatattcttccagtatataatcccttgcaataactgattttcttaaaatttatttatttatttggctgcatcgggcgggtctcagttgtggtgcatgggattcaagttccctgaccagggatcaaacacatgctccctacwttgcaaagtggattcttaaccactggaccaccagggacgtccctaactgactttttaaataatcactagtaattcatcaaggtccgaaagaggcccctccaatacactcacttagctccttcaattccttttctgatattcagtacaacatacattgctttcccaagacagttagaacacttggtataacatttcccaattgacaacaaattgctgaagaaattgttacattacttaatccttccaatgt

SEQ ID NO: 1255 - DNA, 501 bp, Bos sp.
ccttaatctcgcatacaatcagggcaaaaaaatattctgtagcttggaataaaaactagggagaaaaattaaggactgtaaattgggataagacttactaaactacacattttggcaattcactaatttttgtgtgtgtgaacaggttaacaatatgatacctaatcaattttaacataaattaactagactgaatcactgtactactattttcagaacatcagtcttgcagaatgatccagaaataaagrattcttgggacttccctggtggtccagtggttaagatgccacacttacaaggcaggggttgcaggttcaaacccgggtcagggaactaagatcccacatgctgctcagtcaaaaaagaaaaaaaaaaattcttttgccatatttctctcttgaagatttatcatgcatatcaacatattgaatattctgaaaacttcctcaataaagaaacttgttaaattttctctgacatatttttgatcatgacaag

SEQ ID NO: 1256 - DNA, 501 bp, Bos sp.
actgctctggtacagtaggctgcaagacaggtagtgtgactgaataccttgtatgtcatctttagatataaaaggtctgcaaagatgaaaaacaaacaaccaccacatgattggaacctttgagtcactgccatttcctctactgctcagccagatctgccagtggttatgcaagcccagtgagtggaactgaaactccccaaggagtgatcatatcttcttcttattctcttaaaggcttcttgaaagtytctgggttgcatatgttacccagatgagccacataccaatgaaaatgagcacagaggagaaccaggactggttcagctctcaggtaataatgctgttctgggaaagcatccaccaaagcatcctgattaccgtctgctgacctcaaatgatgtttattggaggcttgccaggggtcaggcactgtcaactgttttgctacatctcatgtagctatgtgctcagaatattcccactttacaaatgataaca

SEQ ID NO: 1257 - DNA, 501 bp, Bos sp.
tatttcatgcaaggacaaataaggtaaacgcatcctttccttcacaaataatagcagcgtatttgccaagacaacctcaactctcaaaccacagatgtaatcatgagatttgtcctcctgttaattcaaatccttttacatgacctaactttggaaggtatctaattgaaaaatctcatttgcttttagttcaaggtaaattaaatggatctttaattctaccaccagcaggcaggttgtcactcattaamtgtgtcactttgggatctttctaatctgacaaaaaagtagcattttatcttgtttcataatcgttttgagttttatccctattgagtgatgtatatgttaatagtacctcttactgttacatggtcatttaggaagaaagtgctctccatttcctggaaggcttcctttctcatttaattaagaagacttctcaccagacagctccctcaggttagatttaagcactaatattcccaaaaaaggctcatg

SEQ ID NO: 1258 - DNA, 501 bp, Bos sp.
atcactaaggtaaaattttttttgtttattcacttgaatttataataaatgaatttttcctttcccttttgacagctagctttcttagtctattgctttcattttgttatttagaaaataagatttgatactttctctttcaatacagtataatagatactgttagaaaatcaggaagatgatgacagcagtttttctcttctcaaggttgttctcacctattcagaagaagtaaagctgtgtgcagtcartttctgatggaatatagcaagaggtacaaataactagaatcaacgggcaggtgtgattttggagttgtacacaggtctttaatagagcttactaacagtgaatggaggtaatttggtatagtggaaggagccgaatcttttgagtcagacagtcctgaataaatctgttaaatattcagtgtgtgaacttagcaagttacttaacctctttggtcctcaggtgttgtgtgtgtgtgtgttttcatttgta

SEQ ID NO: 1259 - DNA, 501 bp, Bos sp.
atgttctggaagggtgcatgtatgcatcctcagttgcatctgactctttgtgaccctatggactgtagctcgccagactcctctgtccatgagacttctaggcaagaatactggagtgggttgccatttcctcttccaggggatctccctgaccctgggattgaacctgcatctcttgtgtctcctgcattggcaggtggattctttaccactgagccacctaggaagctccctctagaagggtacaaacrgctttaaaaattccaggtgggagaggaaggaacaaagatgaactcttccttttgcaactttaatatgtaacaactacaaggtaaacgcatcttaccacaatcaatattgtctatcatttagtgttaatgtggtatgtatatattctacaagagtccctgttttccttttccaaccatcctaggggctcccctctgctctcccagatggactgcacagaaggtaacattgtggcatcctgctctaagaaaa

SEQ ID NO: 1260 - DNA, 501 bp, Bos sp.
ggtaaagaatcctgccaatgcaagagacaggggttttatctctgatccaggaagatcccacatgccacggagcaactaaacccaggagccataactactgagtccatgtgccctagagcccgtgctctgcaatgagaagccatgacagtgagaagcccgtgcaccgcaactggagaatagccctcgatcaccaaaaccagagaaaagcctgtcagcaacgaagacccagcatagccaaaaataaataaggraaaaaaagcagcagctgccccaggactctagaatcagaacctgaaaccaaaccgtgcccttaacatcagtccacatacaagtgctgcctttgttttccttatctcttctcctttatatagctccattagaaattagacttatatagatgacagtaattagggaatagtgtctggtaacaagtatataggcagctccttggtagagcagaactggagtcagtcatgcctttaggaccatctaagtgtggga

SEQ ID NO: 1261 - DNA, 501 bp, Bos sp.
ggaatttattttaaatatagcagtgtgtacgtgtaaatcccaaactcccaatctacccttccttccgtccctccccgctgcctccagttgtaagttaatctccaagtctgtgagcctgtttctgtttcgcaaacaggttcatctgtgtcatttttcttttagactcagcatgtaagcaataccatatgatattggtccttctctaatttacctcccttagaagaataacctccaggtctaaccatgttgcygcagatggtattatctcattctttttaatggctgagtaatattccattgtatatataccacatcttctttacccattcatctgttgatacacatttacaacctcaacatttttttttcttttctttttttttggcttctctgtccatggggtttctcaggcaagaatactgcagtgggttgccatttccttctccaacaacctcaacatttttatctttgcatatgcttggaagtggtggggatgggact

SEQ ID NO: 1262 - DNA, 501 bp, Bos sp.
acttccacatgctttatagatcacaccacatttcttcctctcaatgcatatcctttcccagtgttcagtctctctgacacatgatccgtcccagtttgtccatgaagtgttttcaaatgttaaccactcccagtttccacttatactcaaatcctacatagaagtagggatccacggtttggagtttacagtctggggaatccacaagcagtctggatgtccactgggatttctaccaagttctgtaacaycacctatgcttcctgtgctggctgacatgtcctggactccttaaccgaccacgttagaagcactgctctgtaactggaaaccgaaagccatgcaggagtttggggcagtagaaatgataataataaatcctatatcatttattgttgactctgtgccaggtattgcactagccaagcccttacatggaccatttcatttaatcttcccatggccccagtggggttgaggttcttatctccaacatcccca

SEQ ID NO: 1263 - DNA, 501 bp, Bos sp.
ctcacagaagcttccagaacttcaaagatttagggagactgacaatgggctaggggattggcagaagaatataatagatgaacaggagaagaaactctgccttaccaccaattcagtgaccatccgctttccatggcaacttggaatgaagagaagctggcatgagctgtagccacatcaggaccactgatctctgaagcatgcattcagagaacagtgatgcctgcattgtgcgattgcaatgaatagakctgggtgtaggtaaaaacagtagactaagggcaatttgtcttgaaagcccttccattttccttcaccattcattcaacagtgatatactgagcacagttatttgacaaacatgatacaaagtgatgtgagatctcaaagattattaagatttaatttttccttcaatgaactcactggaaggcaaatgtgacatctgtacaaataattacaatttaatttagaatttagaattatcctatgtgaagcata

SEQ ID NO: 1264 - DNA, 501 bp, Bos sp.
attttttgacttgtggtgagacagacctctaaacatatgtatcctaaaagatatacatgtaattttttaccttggcattttaagttattaagctgttgggagctgagagaacagacctcagaagtctcctgcatgtttgcatgacctgaaatgtcagcatgctagtttttcacatgctgcttagtacagtaagtctccagcaggtttaaataaggtcatgtcagaaaaatatgcctgagtttttaacactkttagctcataaaggtgccaggcagtaatggcatattcagatcattcattaagcgttgagctacaatcctcgtaccctacagatcttcctctgttcaggtgcacttctggtgctgaacgtgaaactctcacccctcaagcgaggaagtgaagggtttcagctgcagctctcagtttgtggccggagtcacacttcactggcccttttataacctcagaggcactctctgcatggccttctgctctagcaac

SEQ ID NO: 1265 - DNA, 501 bp, Bos sp.
ccccaatgaagtgataccatgtatatatgtaaagtatgtagcacagtgccttaaaaaatgaatgtactaaaaatagagctattccccagctaactaaactctttaaaacttcatcacttatatctaatttccttcacaaatctatctcaatccatctcccaacagtgcggtatcaatagttggaaatcatctggtccccacctctttataattggtttgcttcccttttgcccttgtatgatttatacagsacttaggtctccctatgcatcttgtgatatttaagctgtataaaatcttatgcccacagactgtgaataagaaggctgaaattagattctgatgatatttttcctttggatattcacaaagtagctatgcagtttttgggtcctctgggtgtcgtgagatagccaacttaataatatacctttccccatttgcatcgtcatcaacccatccacactggcattgttgaagacatgtggattgtgttaaaat

SEQ ID NO: 1266 - DNA, 501 bp, Bos sp.
aacataagtctttccaatgaacacccaggacggatctcctttagaatggactggttgggtctccttgcagtccaacagactctcaagagtcttctccaacaccacagttcaaaagcatcaattcttcggtactcagctttctttatagtccaaatctcacatccatacatgactgctggataatgccaaggagtaagcgtcttttaatttcatggctgtagtcaccatctgcaccatttggagcccccccmaaaataaagtatctcaccgtttacattgtttccccatctatttgccatgaagcgatgggacaggatgccatgatcttagttttcaaaagtgtcaattctttgatgctcagccttcttttacttctttaggctccttttaacaaataaatctagacctgaaagttgcatgtaaaattattcttcagggttgaaattttcacttttcactgtaaaccaaatagcaacattacaagaacagtctgtcattaat

SEQ ID NO: 1267 - DNA, 501 bp, Bos sp.; identical to SEQ ID NO: 13

SEQ ID NO: 1268 - DNA, 501 bp, Bos sp.
  misc_feature (1)..(18): Nucleotides uncertain from position 1 to 18
nnnnnnnnnnnnnnnnnncattgatgtgagtctattcaaaccaaaatcttcagggctatctgtgtcacaatcagctcttagaagctgactttctcatttggctgatggggaacattcagaacattttcctggttcatacactcatttttagtaaccataccagttactacaagagagaaaaatcacagacttagttaacttgggtttaacccaaagcattcccccaaagttctggttgatctctaattcaktcctcaactttcaccacttggatttatttccaagatgggatcacttgagaatttgaggttagaaccaatgacagaaaaaaaggaagtcttagcaatcatgctaagtaatgcttccttctttattcacctgggtcttccagcatgttgacctctgaacagttgatccctgaagcctcctaagactttcatctccaataccagcctccaaatgtgcccatggtgtagcctggcccatgtgggcattaccacc

SEQ ID NO: 1269 - DNA, 501 bp, Bos sp.
gaatgctcaccacatgacagccaataaatcaagagatgaagtgttggcacaaggaataacaactttattcagaaagctagcagaaagataagatggtggaccagggtcccaaagaaccatcttacttgaattagaatccaagcttctttaaatcaaagggaaaaggtgaggttggttgttgcacaatttttggtgtcagaagcttttgttcttacaacaggtcaggtcaggtcacagatgttcctgtaaaygtccaacacgacaaaagtttttctctgttccgcaatttttttaatctctgtgtgaatggaaaagtgttatgcctttaaaggtcagagccttgagaatgagctatcttgaatatttcagactataggcaatattctttacctgtagctaaagcaagagaatacaaaggttaaagtaaaagaaacagatacaatatggagtcagatttgttcttcactattacaatctcacagttcctgcctctgtgctttt

SEQ ID NO: 1270 - DNA, 501 bp, Bos sp.
cctggaaggctgcaccatccataatcaacatgagaggaaagaggaattgtttttaagcaggaagtcagcctagcatgattcccacgcataggaagtgttgaactaatctgtgtaacactcaacaaaatgctagccaagcaaatcccacaagctgtcaggaggatcaggcaccatgatcaagttggggtcattccagggtcacaagcatggctcaacatatgcaaacgagtcagtgtcagacaaaagacacrcgatcatagatgcagaaaaagcattggataaaattcggtatccttcatgattaaaaagaaactcttgccaaagtgggtgtccagggaacacagctcaacatggtaagagcccttcatgacagacccacggccaacacattactaaatggtgaagcgcgggataaggctgtgtggggtacaggcaggacacagaaataaacagcttcctagctcctctggaagtgggtcatgacagtaatgtttatgagga

SEQ ID NO: 1271 - DNA, 501 bp, Bos sp.
tggttctaaagcgtagatgtgtaacttgattacatttaattggactcatttagagggcagtgcagacttcagttttctcttctgagaggagagatacatttttattttaatgcgcagggatttaggcatgtaaagttaataggagagatatatttaaacctctgcccatggaaatgggcatataatgttttcccccaggggaatttgtcttaggaggagattactatggtgaattaattttagctgctgtyctgtctggctcctaatttcagataatatgctcttttgatttatttaataggaccttaaaatgcaacaccccagagtttaagagaatatgatgataaattggagaaccaatgagaaagtgtgtgtatgtgtttcttctttgagaaaatcctcatgccgtagttaaatgctgagttgtttgcatgtattagtgttcacaggcccctctcccctctacaccagcttaaaggtaacctggaaacaatgttagga

SEQ ID NO: 1272 - DNA, 501 bp, Bos sp.; identical to SEQ ID NO: 629

SEQ ID NO: 1273 - DNA, 501 bp, Bos sp.; identical to SEQ ID NO: 631

SEQ ID NO: 1274 - DNA, 501 bp, Bos sp.
tggaaaacaataaatttttctctgtttaaaatggctgagtgttagtcactcagtcatgtccaactctttgcaaccccatggactgtagcccgccaggctcttctgtccataggaatctccaggaaaggacactggagtgggttgccatgtccttctccaggggatcttcagacccagggactgaaccccggtctcctgcactgcaggtggatcctttactctctgagccgccataggttgaagttacttcyctaaaactgactggaccttgaggaatctttatacagatattttaaattactgtttccagttctatgatggttgtttcttgagttgatttgtaattcatattttctgacatatcttattcattttcatttttaagtaaagtatgattagtcatatcctctttttaaccttttaatctctggcaacagtgttcttcttatgcttcatctttcttcctcttcgtgcttcagtctggatattctctactgagtt

SEQ ID NO: 1275 - DNA, 501 bp, Bos sp.
ctttttaatcatcatgcccctgattgctgattatttactcttctgctgtttcctctcatgattacacagcctgctatggagccaggcatcatgcctctgcgagtccctgtagcatctctctccactttagtttgtcataaagcagctggtttcttctctcatccatccactaagtatgccctgcagaattgtctaaccaagattctacatgatatggttgcattctactcacagcaacctaaaacctacayggctatagtttcaatacacgggtctacagcagaaggaagactactgttattttatagattgttctggaggatgctgctacactggtacatgatctcaaggtgttgaagatattggcctactacttgatttatacacagcttccataaattttagataatccaatgacaactttcagtgctacaaggctaattaatttttttaaaggtattcggaatagcaaatttgctttatataaaggccttagcaatg

SEQ ID NO: 1276 - DNA, 501 bp, Bos sp.
agaatataatcaatctgatttcagtgttgaccatctggtgatgtccatgtgtagagtcttctcttgttcactatgcataataaatctgttgtctgaatatttgaaatccataaccagagtgaagacttatctgataaatatgcaagacccagctcaagagcaaacagtggggcaaattctggcatatcatagccacaataatcctaagaagatcctagatacactatggaacataatgaaccagctgaccraatactacgggtgtcaatttggcactaataatctaaataaataaaagattcacacattagaatttggtatatgctgagaagtatttatgttgaagctgaaagacattccactgctcttgttatctgatcaaaaatcttctctggctccaaaattcatccttgtctttagattaatattagaatctgcctacaagaagcagaaggtcattcaccaacagatagttggttaatccttactttcttcatgtag

SEQ ID NO: 1277 - DNA, 501 bp, Bos sp.
ataaccagagtgaagacttatctgataaatatgcaagacccagctcaagagcaaacagtggggcaaattctggcatatcatagccacaataatcctaagaagatcctagatacactatggaacataatgaaccagctgaccaaatactacgggtgtcaatttggcactaataatctaaataaataaaagattcacacattagaatttggtatatgctgagaagtatttatgttgaagctgaaagacattcyactgctcttgttatctgatcaaaaatcttctctggctccaaaattcatccttgtctttagattaatattagaatctgcctacaagaagcagaaggtcattcaccaacagatagttggttaatccttactttcttcatgtagtacttgttcctcaattgctagtcctcttggtaaatacattaggacaactgaaaccataacaaatattggaagccatggtgagattttgataggctaggtgctcagtcac

SEQ ID NO: 1278 - DNA, 501 bp, Bos sp.; identical to SEQ ID NO: 14

SEQ ID NO: 1279 - DNA, 501 bp, Bos sp.
tctccgtggctgctttcagaccccatttttattgactagagaagctaccactgccttgtttattttattatttttattttttggctgggccacatggcacgtgggatcttagttccctgaccagggatcaaacccatgccccagcagtggaagcacagagtcctaagcactggaccaccagggaaatccttgccactgcctcttgagagctaagtatacacatatcttcccaactctgccttcagtgatgycacatcagtgttgtaaaatcatccataataggaggatttataccacaaaaatggtcaaacactgcaagctagtttcttcccacctgaagagccagtttttacgcactgaccaccaaactcctgcttataccttaccaccgcatctttgataagtcctatttgtttttcaggaacagatactttcctttttctgaacctacaatttttgaggatgttgctttaggcaactgctttttgattccacataatg

SEQ ID NO: 1280 - DNA, 501 bp, Bos sp.
gacacaaaaatgggcgctatataatgcatttttaagaaaacaatatttatgaaatccaactttgatctagatatttaataaactagtacaattattttatcttaagcaaggatttctaaagcggtatttgtctataccaaaactgctccaaaaacttgagaaaaaatatatacacttaagcaactaatttgtttccatcattatgcctgtactatttttatggtaattaatttcagcgggttgtttgtaamaatgacttttgtattagcctacattatcatgtctaaaaacatggattagggacataatgcacagaaaaactgctcgtattggtggcaaacaagtggctgtataacaatgaagtgccatagtacggaaagaaattagatagaatcagaaaaataatgaggctgcaccactttataacatctgtcattttgggcatagagaatagatttgtggttgacaaggggggaggggggaagaagatggactgggagt

SEQ ID NO: 1281 - DNA, 501 bp, Bos sp.
ttctctggtcacagatcactgaactcggaaagtaagtgggtaatttctccatcaccttacttcatcaaagtgtgtccttattttacctagctatgtttctagagaattcctcaagcttaattttcttgacccccttccttaccctcaatttccccacaatagatgtcttaactatgaggagagagatttttgaatgttattattagttttttactataagaagtaatgaaatcactgccagtgaaagccarttagaagtttttaataatgcctaagactctcttgttgtctattatgttgctaagtgaacactgtcctcttagaactcttagtacatatccctgttatatagaaagaaccagggcactaaatgccatttagtgactgcgctacctcttttgcattggcagatcttgtatgcttttctgtttttgcagtgtgtctttaaggactttcttctattaggatcaggcctttaaagtgtttcttagaatgatagtt

SEQ ID NO: 1282 - DNA, 501 bp, Bos sp.
agttgatcaactagaaatctaatgcgtatgtaaaaatgatgtccgtcatgatacaattgcacaaatgaaataagtacctcattttggtccccagtagtaaaagatttctttgtaaatataaatgagataaaataccagtgaaaaattcttctctaatttaccataagcaaacttccatagaacaatctgggatttttgagttgcatgaggcaaacaactgaggtagtagggcttgccctgaagttcttggrtatactggacatttaatcccactacatgggatgtgagtttatttcagtcatgtttttataaatgagaaatgttatattatagttatgaaaagcccatgaattccttgtcacacactcctgagtcagactgttggtcaatatttagtgaatatacactctggtaccaggcatgatatcaatattaagacaaatgtggagtattcatttattcgttttttctaaatctagtaagaaagttaagtttttgttg

SEQ ID NO: 1283 - DNA, 501 bp, Bos sp.
cttaaagagaaggcatctggctagactgaggattttttcccttgatatgagaagtttcatttcccaattacatctcaatgggagacttgttgtaattgggttttaagttcacagatggtggagtctgaaaaactgtcacaagttgaccgacgctaacaaaactgaaaatctctagcctttctttctttcccactccattctctctgccctctttctttctcccctgacaccaaatctctgccaatgtttgsaagcaaaatgtgaatcagagtttcaagacaacactgagctctggtggtgcttcttttcctcggctagaaggacttataagaacaatagcggttaacctgctatgtgccacagcactcggactgaggattgtgatcatgtatgtgttgcattactatggccaactgatacatttttcacactaaatatcatgcattttggcactatattcttttgttctttatggctcttcaggagcttagaaggaagaga

SEQ ID NO: 1284 - DNA, 501 bp, Bos sp.; identical to SEQ ID NO: 867
  misc_feature (434)..(501): Nucleotides uncertain from position 434 to 501

SEQ ID NO: 1285 - DNA, 501 bp, Bos sp.
aagactaccccctacccctcaaatgaatcagcttccccaaggaatctagctctctctttgaattcattctccgcatccttctgctcttagcatggatgtcctcttcttcaagaagaggctttccctggctttctaggtctaggttagatacctctacaaatgagaaatgcttttggctacaaataatcgcaaaacccaaataaagaaacttaagcaaataggagttagtttttctttcatggcaagaatcrggaatgtagagatttgctgctttggttcaggaagtgaattatattagggacttcctgctgactctctagaattcctttggctttttccttatggtcacaagaggattgtagcatcactaagcaatcagtttcccattccacatagaaaggtagaagccaaaggaggagtgatgctctgagtttctcctcagtaccttcttcttcttttttttttttaaagaaaaatatttatttatttgactgcaccagc

SEQ ID NO: 1286 - DNA, 501 bp, Bos sp.; identical to SEQ ID NO: 868

SEQ ID NO: 1287 - DNA, 501 bp, Bos sp.; identical to SEQ ID NO: 869

SEQ ID NO: 1288 - DNA, 501 bp, Bos sp.
  misc_feature (1)..(27): Nucleotides uncertain from position 1 to 27
nnnnnnnnnnnnnnnnnnnnnnnnnnnttatcttgtatggcaaaagtcttttccatgagcagttagcaatctttattttttcaacggctctacttgtgttatggaaacttctggcaaaatgcacttggtctcccaaacacatggatcagtatcacagtgtgctttactgttccatatgcagacatttgtcatagggctcctctacgcaggcggagagtcttgagagtcccttggactgcaagatcaaaccwgtcagtcttaaagaaaatcaaccttgaatattcattggaaggactgatgctgaagctaaagctccaaccctttggctacctgatgagatgagccagctcataggaaaagactctgatgctgggaaagattgaaggcgaaaggtgaaggggatggcagaggatgagatggttaggtaacatcactgactcaatggacatgaatttgagcaaactctgggagacagggcagtcctggcgtactgcgatccat

SEQ ID NO: 1289 - DNA, 501 bp, Bos sp.
tattctgtgggtgctgcttcatcatatagactccatgccgttttgtgaggaaggttatatttgctgaaatgttaaatgatcttaaactatattgacatttatatcaaatttccagtgaagtgaaattcacttctcctatgaaatcccagtgtggaatagacgtcacatcaattaatacattagcactctgggatcatcaccacctaggtgagataattcattccagagggtttatattcactgtgcacacrtgagtgctcattcagtcatgtctgactccttgcggccccatggactgtagctcatcaggctcctctgtccatggaattctccaggcaaggataatggagtgggttgccagttccttctccaggggatcttctggacccagggatcaaacctgtgtctcctgcattggcaggcagattctttaacacggagtacctaggaagcccctattttcactgtagggaaacttttaaatgggtagaaatgaattgt

SEQ ID NO: 1290 - DNA, 501 bp, Bos sp.
tgaaaacagtgtctcaaataagtgagctagctggcctggtttccttttggaacttaaaaaatctctgattataatgtgactctgtgataggtgttttatgatgtcattcatagataaaatttataaagtatgttgtgtgtatatatagtatttatacacacaataacgatggcaatattaaacaagtctacacatacaaatatgccaaggttgattagtttgagcctttcttctccagctggtaaagtcaytccctatatagaaaacatacaggaaagataaatcaattttaccaaaaatttttctaaataaaaatcatagtaaacaagcagagaaaggatcaatttgagaatccaataaataaaaataagcagtcataataatgagtattctttattcttataaggaaatacataaaataggctttcttcagtttatattacaccttttactcatttaacaaatatacttactggatgactactgcataatgctatgttt

SEQ ID NO: 1291 - DNA, 501 bp, Bos sp.
ggtattttccaggcaagaatactggagtgggttgccatttccttctccaattctactcagaagctggaggatgttggcgaggtgaaatagaggtcacagacaaaagagaacagtgctctcatcctacaactgccctgtgtttcccaagaaaatacatattcattcctttgattcatcctcttgctcttgaactctgacccccacctcccaggattttactgaccaccatatttaattaactcctgcctgcycctcccacttactatcatatcactcttctttattcccttcacatctgatattattatctgataatatctttctcactttctgagtcacttggtcttcctccatttcctaccagaatgtaaactccgtgaaggcaaagccatttttgcctgaccatgtatcctcagtgcctagaacagtagctcgtggttagtagatgctcaataaatatttgctgaatgaatggatgagtgaatgaaagagaaaatgagc

SEQ ID NO: 1292 - DNA, 501 bp, Bos sp.
cagtactctggccacctcacgcgaagagttgactcattggaaaagactctgacgctgggagggattggaggcaggaggagaaggggacgacagaggatgaggtggttggatggcctcaccgactcaatggacatgagtctgagtaaactctgggagttggtgatggacagggaagcctggcatgctgcagtccaaggggttgcaaagagttggacacaactgaacgactgaactgaactgaggttgcccayactaagtattaatacatccactgaaattttgaagactttctagctactgggggagaaacgacataagcaaatgctgactttggggataactgactagtgatgaaagcgccatttttactggaatcatcaaaggtcacaaacagaatcttacttatatcttaacaaaagcactaaagtctatgataagatatttgttaaggagctgtccgtgggctgcagacccgggaccgctgaaggagtgcatcctgac

SEQ ID NO: 1293 - DNA, 501 bp, Bos sp.; identical to SEQ ID NO: 870

SEQ ID NO: 1294 - DNA, 501 bp, Bos sp.
agagagagagagagaacgagagagaaaacctgaagacattttatcgtgtggcatttcaaacgtctttttagcaccactcatacttcaagcaatgtgagctggggacatgccttagctccaagcacacgcaagccatccaacaaatagtgaactgagcactaaattaaattgactcagtatgctagtccaagagaaaagcactggtctctccatgattcccaaaagtggttctgaaagaaacatttgtctgrgagtaagcacatcctcgtactttatcttccagaagccaggctctcaaagtaaaagtcccagcatctattctttctgattccacctcaacagtactagatctaattatttccatgtaatttgttgaaatgtcagtgttcaattttttaaagcaagtgattatcagtgctttaataaataatgtttaatatcaacagggatgtaaaatgtgtaaaccatttaatctcctgtttttctcacaaataaaagttt

SEQ ID NO: 1295 - DNA, 501 bp, Bos sp.
aggtttttctggaagaggttctttcccttccctctgaggcctgacccctggatctccatctctcatcgttacctatgacaccatcgccttcatctttccaagggttggcagacggaaaccagtggtgttactgctcttcccagggatgtttacatttcaaggctgggggcggtcctttaaaacccttaccagcaaggatcaggctctgctggcttcagaagtatttgcagcgcaaagtaatatgaataacsataccgaccattcattacccacctaccgcgtgccagacattggtctgaatcccttatatgccttcccttccttgtcctaacaaaagcctgaggttgggacttttattgtcaccccattttataaatggagatactgaggcacagaccattggtaaccggtccaactatcacacggtaagtggcagagaagggacacaaacgcaggcaacctgactccagagtccactgcagcctctatgtaaccgagcac

SEQ ID NO: 1296 - DNA, 501 bp, Bos sp.
cttacctactcaataggttgctggaaatcaacaactggttctttaggaatgcttaatgtgaatattactttgaagtagacaggatgcttaaaatgtatgttcattagaatgggtcaattttctttaacaaactataaataaggggacttttctatttcatacttttactttcagaatcaagcaacatgattctcagcactcattcccatggggtagctttgaaatggattaaacttctgctagagtggtaraatccagtgcatatataaaaagcgcattatttaagagcttgaagctgaaaggggatttgaaagagtaagtgactaaataccaatagcatctaagatattaaaacaaaagctaaataggtttcacatatatatttttaacatccaatattatttttccctaacctatctgtaaagaaaattgagaattatgtatatatatataagagagaagagagaaacacagagaaagagaaagtgagacagtgagagt

SEQ ID NO: 1297 - DNA, 501 bp, Bos sp.
agcgcattatttaagagcttgaagctgaaaggggatttgaaagagtaagtgactaaataccaatagcatctaagatattaaaacaaaagctaaataggtttcacatatatatttttaacatccaatattatttttccctaacctatctgtaaagaaaattgagaattatgtatatatatataagagagaagagagaaacacagagaaagagaaagtgagacagtgagagtaagaaagaatgtattagggcrtatgagagaaactgcaggaacacatgtagattatcaggatataggctgtctttctattttattttcataatcatacattcaaagttctaagtctatcagtaaacaccactgaagaatatcaaagtcaccttgtgttaaaattacttttattcaggatgaaaaatacaacatgtaaccagtttagatgatagtctatgattagttctttaccacatatttcaaaagaactacatacttatttccccttgtt

SEQ ID NO: 1298 - DNA, 501 bp, Bos sp.
tgttatttaataaaaccctaagatctctgctttcaaagatgagattttacacccattacaagttttggttgtgatcctgtacaggttgcagattggctccacctgttttttttcatctgcagttcagggtaaaggacattatccccctggcatatagcatgttccaggacacattcaagtacacatgcacttgaatgtcctttgaggggacagggaattaaagcttctgataacacatgacattcatcatrtccgttcatattccactgaccaaggcatggtcagggctcatgttcatagagtagggtgtcattagtatgagccacagtattactgtttataaagggctgcagctgctaagtcgagttagtcatgtccgactctgtgcgaccctatagatggcagcccaccaggctcccccgtccctgggattctccaggcaagaacactggagtgggttgccatttccttctccagtgcatgaaagtgaaaagtgaaagt

SEQ ID NO: 1299 - DNA, 501 bp, Bos sp.
gaaaagtgaaagtgaagttgctcagtcaaagcagttgaatattgacaatttcatatagttcctattgcataagtgagttgaatctgaagtggaaatgggcggtgctgcataatccttttatgatgagtaaatgcgtggtaagagtaaacaacaaagcagtctgtcagcatggaaacagattgtcatttataacatatctttgaagaaaaaaatgtatcttaaaatgttcactctacatactttatgggtaygtgtgtgtctgtacacatgcacttgaatatgcattagtgtacaaagattaaataattagtgtaatcgttagttttcaaatgacagcagtatcgaatttgactagttaatttttatttcattgtaggtatattaaagcaagtcaaagattacattaaacaatgtagcaaatgccaggagaaactagatcgctcgcgtcctatatcggatgcttcagaaatgctggaagaattgggactagatcttgaatct

SEQ ID NO: 1300 - DNA, 501 bp, Bos sp.
aagaatggcatgagttgttccaaagcgaaaaaaaaaaaaaattcataatttgtttgttcaaagtttgaattatctagtaaagaattgttaattgacctgataaacatgttttaaaatgcagtcataatccagatatagcaagtaaatctatgatgaggttgagagacaagtccagaaaggattgatcttacattagtgaaatagtggttgaaaatgtggaagtggattgacttggtttgatttttgactcygatacttgctggccattttttattctttctgtcccttagtttttttaaaacttaattttattaattttttaaaacatttttatcttttaaatttttattttataaatggagggcccaatcacaatagagtccacaggttttcatttttgtataaaatggatagaaatagtaccttatctgattattttgagaatatcatattgattcttagagacattcttagaatctagtatacactcagaaaatgttt

SEQ ID NO: 1301 - DNA, 501 bp, Bos sp.
  misc_feature (494)..(501): Nucleotides uncertain from position 494 to 501
tacaagagactattatactgtagaatgatgaaatgattttatttataaatgatttttattttatgtcatttttagtgcatgatgcagtattttagaaatacagacttgtattaagaacaatttacatcatacatgagtggtctagtagttatcccttctttcttcaatttaagtctgaatttggcaataaagtttcatgatctgagccacagtcagctcctggtcttgtttttgatgactgtatagaatgygaagtcaagtgggccttaggaaggatcaccatgaacaaagctagtggaagtgatggaattccagttgagctatttcaaattctaaaagatgatgctgtgaaagtgctgcactcaatatgccagcaaatttggaaaactcaacagtggccacaggacggaaaaggtcagttttcattggaagcccaaagaaaggcaatgccaaagaatgttcaaactaatgcacaattgcacccatctcacagnnnnnnnn

SEQ ID NO: 1302 - DNA, 501 bp, Bos sp.
ttccctcactttcttcaatttaagtctgaatttggcaataaggagttcatgatctgagccacagtcagctcccagttttgtttttgctgactgtatagagcttctccatctttggctgcaaagaatataatcaatctgatttcagtgttgaccatctggtgatgtccatgtgtagagtcttctcttgttcactatgcataataaatctgttgtctgaatatttgaaatccataaccagagtgaagacttakctgataaatatgcaagacccagctcaagagcaaacagtggggcaaattctggcatatcatagccacaataatcctaagaagatcctagatacactatggaacataatgaaccagctgaccaaatactacgggtgtcaatttggcactaataatctaaataaataaaagattcacacattagaatttggtatatgctgagaagtatttatgttgaagctgaaagacattccactgctcttgttatctgatc

SEQ ID NO: 1303 - DNA, 501 bp, Bos sp.; identical to SEQ ID NO: 871

SEQ ID NO: 1304 - DNA, 501 bp, Bos sp.; identical to SEQ ID NO: 662

SEQ ID NO: 1305 - DNA, 501 bp, Bos sp.; identical to SEQ ID NO: 224

SEQ ID NO: 1306 - DNA, 501 bp, Bos sp.
aaagaattaaaatgatgtgaatgttacacatcactgataaataaaattaaagctaaaaaatattttcatcacacacacacacacacacacatgtacacgactctgaatttcatttccaggccttaccagctggctagcatttaatctccacaagcttcaatatccttacctataaaattgaatgaaagtatgtattttaaagggtttctaagaaactcaaccataccttatggcagtataagtatgccatmcactagtgcttaaacaatagtagctattttaggcctgaaaccttttattttgggcctgaaatctttcaattgatgcaaacagaaatagcagtatctccatttactgatctttattaatttcacagggtaaaaggtgaagatatcacttgcttcctgaccttgtaggtatagttagtgggagactctagtaccttttctctttcttgcaggtatatatctaatcattcactctctaccatagccctggcat

SEQ ID NO: 1307 - DNA, 501 bp, Bos sp.
attgcagaacagcgtcccaggttactaactgagccctggctctcttttactgtggtcactctgagggcattatattttacattggactgttgctgtctttctccgccatgtacaagaccctttggacctaaaacattgagtggcatctagtagatatgtaacaaatatttgtttaagtgaatatttttatcccaattgatttatggtgagaaatcacccaaatgtatcgaaatatgggaacaattacatamgttacattggggttggccaaaaagttcgttcaggtttttactgtaagccgttaaaccggaacaaagtttttggccaacccaatagtatagccatgtgttagaataatgtgcgaattatgatgtggtgctaagttccgaagcagtacaccgtgggaggacttcaaaattatgccaggtctgcaggaggagaccactggcctcctgacatgcagtttctcttctctgggaagaatgattaatagtcattagc

SEQ ID NO: 1308 - DNA, 501 bp, Bos sp.; identical to SEQ ID NO: 872

SEQ ID NO: 1309 - DNA, 501 bp, Bos sp.
tgctatatttaattcacctttcacgttaatggttatttagaaaaattaaccttacatagcctgaagaacaacttaagttcctgtaggtacttctgtgttttcttaaacatgagtttaacaaattatcaggaacaaaatattcatctcatttcagagatttccaaatattaaaactcagactggatttagtatgtaagtggtaaagaggccttctcccagatgggactggtatcatggtttgacaagcaccmaagttactactcacgatatcttctgcaaaaacaacactcctaatgcttcacctgtatttcaagtttccaactgaaacacagttagagttcaaagggacttttgtgtcaaactgagtacaaaatcttttcagatttaagatctcttccccaatcctttgctgtatttttctccactcctaagtgggcaacattttattggttcatatttattacatccttccaaagcattcaatttatatttacagaaaaa

SEQ ID NO: 1310 - DNA, 501 bp, Bos sp.
cgatgtaaggaaggacaccatcctaagtgtttaagagccagcggttgctatgcagcaatagtaggttcagatggtgcaattagagcaattttggttttaaaagtttgaaaactaattaaaagccatattgtgaagaaacttgaatgtaagtatagattttatcctacatgcattcagcagccacttttcttttttcgactattgttatgggatcaaagaacttgattacatgaatagaggcaagggaaaayggaaccaagcagttaaaaaaatagtaaatgatagcaggatggataaacgacaaggtctgtattcaataccctatgataaaatataatgtaaaagaatatgaagacaatatatgcatgtataaccaactcactttgctgcacagcagaaatcaaacacaacattgcagatcaattatactttaataaaattaaaaataaaataagtaaaaatttaaaaatagcagtaaataataaaacaattagaatagct

SEQ ID NO: 1311 - DNA, 501 bp, Bos sp.
tttaatattttagtgccatctgctgtaagtttcatggcattctaccccatctggtttatttgcagctattcctcccctcctttttttttagtcttagtagaacgcactaaatctctttccagatcttttgtaatatttggccctgttccttcctactgatcactggctgaggctttcgtcagaggaatatgttcccttggctctgggtgttcatttcctgaagacttcggtttcgatttagtgggatatgygtgtgcatgctttcatatatgtgtgataatgatcaagcagttaacacattcatagacttctttgctttatctcaaatgatagtttgactgttgatgagtgaatatttgtaaattcagcagcatcactaggtaaataattattgaaagcctattaacatgccaggctttttcctaggcacagtgagggtcagggggagagtggcaaacaaagcagatgccctgctcccgtggagttcagttagtggaggag

SEQ ID NO: 1312 - DNA, 501 bp, Bos sp.
aaacagcttaatcagtttttcctcgtttttccttctcaacagtgtgtgatgtccttccgctaataattaacaaccacgacgttcggctgcctgccaatttgctgtataagtacttaaacaaagcagctgagttttacataaattatgttactagatcgactcagatagagaatcagcatcaaggtaagtgggaatagcttgcaatttatttttttgtcctttttcattttgtaaaatttccagctcagaartccctcagtgttttgattattctcctctggatatgtaccagtttgatagtctttttaaaagagggttcctagaaaacaaacactacgcttaagagagaagacttttctggaaccagctttacccctcgattgaaagagtgaagctgctgaacttgtaaggttagcttcgtacgtggacccagctcacaggtcccttcctgctcccccaggggtggacacaagcgtgttgaggttctgtgttcttgcctct

SEQ ID NO: 1313 - DNA, 501 bp, Bos sp.
taaagaatccatctgcaatgcaggagacacaggagacctgggtttgatccctgggtcaggaaaatgccctgaagaggaaatggcaacccactccagtattcttgcctggagaatcccatggacagaggagccgggcaggctacagtccttggggtcccaagagtcgtccacgactgaatgactaagcacgtgcgtgcacacagtataaagtacttactatgtgcaggccccattctaagctctttgcctaygttgtctcattaattctcgttacaacctgatgagattggcaccattataattcctcctttacagttggagaaagtgaggccagagattgttgaataacttgcgcagggtcacacagctagtaagtgtcagagcttaactctggaatggacccaggcagccctactcctggggtctctgctcttaactgctaaaccatgctggcacttagcaggtgctcaataaaatattaattggcttgaaaacactcct

SEQ ID NO: 1314 - DNA, 501 bp, Bos sp.
cgtatacctaggaggatgggagagacattaattccagggcaacattgctcatgcatccattgaagggaaaagggttaattccaggtccataaggttcatattgatgccatgctggagacagaactctgcctcataaacagtaataccttgcagtgacataattatagtttttccaactggaagacctttggtactcaagtccatttgccttctttattttccattcattgacttacacagggaatgagatycatggatttcagtgttgatgatattaatacattgtagggttttccgctattgttttgtatacgttgttttaatgcttttttgaaataggagaggttgtttagaatatgtaactacagtactatttttttttttttcatgtaagtgtaggcactgatggaattgcccactgcaaacatgcctataacctagcacacccacgtggagtgcactaggatatttctaacaaacaggatgctgatagtctattga

SEQ ID NO: 1315 - DNA, 449 bp, Bos sp.
ctcccccaaatgcctgctttctggacacgggaccttaggattccatcacttccacatgctttatagatcacaccacatttcttcctctcaatgcatatcctttcccagtgttcagtctctctgacacatgatccgtcccagtttgtccatgaagtgttttcaaatgttaaccactcccagtttccacttatactcaaawcctacatagaagtagggatccacggtttggagtttacagtctggggaatccacaagcagtctggatgtccactgggatttctaccaagttctgtaacaccacctatgcttcctgtgctggctgacatgtcctggactccttaaccgaccacgttagaagcactgctctgtaactggaaaccgaaagccatgcaggagtttggggcagtagaaatgataataataaatcctatatcatttattgttgactc

SEQ ID NO: 1316 - DNA, 501 bp, Bos sp.
gtttttgttttgagtcgttaagtttgcaagtgaaagaagttttagactaatagataacttgaacaggagccaatgtcttaaaaacattaagtaaccaagagaaaaaaataatttaagatatgatgaagtaacaaggaataaaagcagttaagaatttataattcctttcacaactgtccacagttaaatttcagactctaaatagttttctttatatatactgagcacaaaacacttttatttttctccarttgaggcaggggaattagtgtgcataaagaatgtcagatggatattcctattgaaaacagtgtctcaaataagtgagctagctggcctggtttccttttggaacttaaaaaatctctgattataatgtgactctgtgataggtgttttatgatgtcattcatagataaaatttataaagtatgttgtgtgtatatatagtatttatacacacaataacgatggcaatattaaacaagtctacacatacaa

SEQ ID NO: 1317 - DNA, 501 bp, Bos sp.
cttcatttttaattttcactttcatgcactggaaaaggaaatggcaatccactctagtgttcttgcctagagaattccagggacggggaagcctggtgggctgccgtctatggggtcacacagagttggacatgactgaagcgacttagcagcagtagcagcagctacctatatcagtgtattaaatagcataatgttatagatcccaggtattcataaaaggggttgtgtttgtaaattttccccactgstgttatagtgattcttcagcgtactatagtttcataactatctgaggagttgagaagtaatacagttgtgtgttggccacttagtattttaaagttaagtctaaaatttgtttattgctggtgccagccggcaaagtcgatcaggtcccgagaacgtgcatggcggggctaagaaagaaactcaagcaagagactacaacaaagatggggtcgagaggttcagacacgtctccacgaagggacgcagtct

SEQ ID NO: 1318 - DNA, 501 bp, Bos sp.
tctgtctaaaagcagtttatggaagtaataaatataaagcagcaataaatttgttgtttccatgagtattccagctggtacactctgttcccttgttctctagctttaaatagttcccaaattttcatgtaccagccacaagtttaagttccctcttgcagctatttatatcatgctgcttgtgtgtaaaataagactcctcattcataaaataggatgataacacaaccttgtcctacttacctaaaaayagtttcctatctgcaaaatggggctaataatatctaccctattgattccacagggttgtgctgagcatcagacatgatactatgtaaaagcaggctgaaattcaaagtattctacaaatcagggaaattccctggttatccaatagttacgatctgcacttccactgctgggggttgaggttcgatccctgattgggggaactaacaagctgagtggcatggccaaaaacaacaaaaacccaaaaaagta

SEQ ID NO: 1319 - DNA, 501 bp, Bos sp.
cacccatgcacaactcctggcccctcaaccccttgctcaaaagcaaccagtattagttttttatactttcaggggtattctatgaaaatgtgtgtgtgtgtgtgtatacatatatatatatagagagagagagagagagagagacaggtatatataatattccctccctccatctcattgttaacacagattgaagcagcggtacacactcttccacacctcaaccacatttttcaaaaaggcgctaattrtaaaacagtagacatgtgaagggtgcgtaagtcctcatccctgacccatagaagcaaccaacttggcaatgaaatctggacgtatactataatgataaaacatagactcagatcttgaaaggaacttaaagatcatctcaatgaatatttttttattgtacataaaaaatattcaaaaggcaaagttacacagccagtctggcaaatttaagatctagaaacaaacttctattttaggggtctagtatta

SEQ ID NO: 1320 - DNA, 501 bp, Bos sp.; identical to SEQ ID NO: 679

SEQ ID NO: 1321 - DNA, 501 bp, Bos sp.
taaatggcatgtgtaaaaacctacaacaccaatggctccaactaagttttcttcttatgaaatcactacaaacaatcataatacaatttgcatgccctgtagcttcatggatatattttcctgagtaattttcatcatttttcttcttttttataaatagcaagagcatagctggagagaattcgttcagcagaaggaatggcttcagtggagccatgtttatacattagcaatagcacttatacatttaygctaggaaaaaaacctgctcatttataattacaactgctgctactgctgctgctgctaagtcatgtcagtcatgtctgacactgtgctatcccatagacagcagcccatcaggctcccctgtccctgggattctccaggcaagaacactggggtgggttgccatttccttctccaatgcatgaaaatgaaaagtgaaagtgaagcactttcactcagtcgtgtccaactcttcacgaccccatggactgc

SEQ ID NO: 1322 - DNA, 501 bp, Bos sp.
tttgaacctgtctttctaggaaggactaaatgaaatagagtgggcttgaacagctggttctaaaagaaaaggatcactggggtcatttagaaggagagacagtatttgtgatcaatattatcaattgttaacaactttttcagtcttagtgtttactttatatgagtaagtaatagaatacaagagacacaaaagcaaaatgcagaaatatatattgtgttacataaaggtttaagttgggatcagttccrttgctgagtctcaaatacttttttcagctgaaagtcatcttcatatgtatgtatatatgaccaattctattgctgaatccagaaataaaaattcttcacttgtatcttacagacatatgcatatattatacatatagacatttgtgtgtacacatgtatacaaacctgtattatacataggtatgcatgtatatagtacatacatgagcagatatatgcaaatacatacacacacgcacacacaaggggt

SEQ ID NO: 1323 - DNA, 501 bp, Bos sp.
caagtttaatccctggattggaaagatcccctggagaagggaatggcaacccagtccagtattcttgcctggagaatcccatggacagaggagcctggagggatatagtccatggggtcacaaagagtcggacacagctaacacacacacacacacacacacacacgggagggctgggagagggtttgatggcattaagccatcatattgggagtttgggattagaagctatggactgatgtgtatggaayggataaacaacaaggtcctactgcatagtgcaggaagctatgttcagtatcttctgatagcccatatggaatctaagaatatgaaagagaatgtgtatatatattgagtcactttgctgtacagcagtaattaacacaacattgtaattcagttatacttcaatgtaaaaactaaaattaaaaaaggggacaatttgaacatcagtaaagacaataactaatgaattgaagctagtcaattgtatgttta

SEQ ID NO: 1324 - DNA, 501 bp, Bos sp.
ttttttctttcattcagtgatatgctggagttattgtaattcttctcattttttttatctaatctcttagaaaatatggtcaccactgtttacagtactaaaaattaaatgttatttcagtacagaacacagcagttaatccagaaagtcaaaggcaggctattgatcacaattacaacccacttcagttgtgcacttaagtcatgttacttggagtgatgcaacaatggatgatccattattgtgaactrccaattatggttgcctacatcacctaagaaacagaaagtagctgtacagtatccatttgacactaacaacagtgttacttttagcccccttttgggggctaccttagtgttttgtacttctcagagccttctgtgttcatcaccaaaaattaggacctcttgtctcctgtggatactaactttgagtactaaaattggagcagccctaggcaagttgggacttgtggaccctgtgcctcctcccaagcca

SEQ ID NO: 1325 - DNA, 501 bp, Bos sp.
agttagtcatgtccgactctgtgcgaccctatagatggcagcccaccaggctcccccgtccctgggattctccaggcaagaacactggagtgggttgccatttccttctccagtgcatgaaagtgaaaagtgaaagtgaagttgctcagtcaaagcagttgaatattgacaatttcatatagttcctattgcataagtgagttgaatctgaagtggaaatgggcggtgctgcataatccttttatgatgaktaaatgcgtggtaagagtaaacaacaaagcagtctgtcagcatggaaacagattgtcatttataacatatctttgaagaaaaaaatgtatcttaaaatgttcactctacatactttatgggtatgtgtgtgtctgtacacatgcacttgaatatgcattagtgtacaaagattaaataattagtgtaatcgttagttttcaaatgacagcagtatcgaatttgactagttaatttttatttcattgtagg

SEQ ID NO: 1326 - DNA, 501 bp, Bos sp.
atatgtatttatgtgaatatatatgtatatatatttcattttattctctcctaggagaacactagagaagtttagtcaaatttctgtgctttaaatttactttaaatgtttccttcctttgcacatatgtcacgaactcaattcacaattagattcctttgtttcactttgcttttatttataaacattcctttttaaattttatcttgttctatatttaaaattttacctggttccaaagtgatatctakaaaatcagatgcatacagagaagaaaagattttctccctgttctctccaccttgtttagcctcttcctcaataggtcacaattttacatcaaaaatatgatagagaaaaaactatgtgtaatatagtgttttatacagacttttgtaatattcaaacattatctagtatcacagctaaagagcatatccttggaagatttccaaaggctgtctgggacatcactttttttccaaaagtagccatgatctg

SEQ ID NO: 1327 - DNA, 501 bp, Bos sp.
aatctgagtacctagaaaatatctgcagctaagcaataagcaacattagtggcttataaagaagtaatctttccaaagctggtcttttcagattgagttacagaagtattagaggaaaggaatgcagtggcgggaatatctggattttattacagcattgtctgtcgtgcttcaagaaattcaacttggaaatgcatttcatatttccagttagtatttgaatgaagtctaccaaacagcaaaatatcacwtttgtcagcttaactaaattgcacatttgcctcagcatgcacatctatgctgccttaaaaagatcatttgtaagatttgtcagtatggagctttatttttagtgaaactcatatcaaaatcattccatgcctttaaaagtctccacaaccttaatatcatatattagaatatggtatacatcttggtttttaaaaaaggtatgcatgctcagtcgctcagtcgtgtccgactctttgtgacccgatggac

SEQ ID NO: 1328 - DNA, 501 bp, Bos sp.
cttaaattcttaggattttgagctaaaaagaaaagaaagaaaatgagagggaaaagactgtgtagtctaaagaatggcatgagttgttccaaagcgaaaaaaaaaaaaaattcataatttgtttgttcaaagtttgaattatctagtaaagaattgttaattgacctgataaacatgttttaaaatgcagtcataatccagatatagcaagtaaatctatgatgaggttgagagacaagtccagaaaggaytgatcttacattagtgaaatagtggttgaaaatgtggaagtggattgacttggtttgatttttgactccgatacttgctggccattttttattctttctgtcccttagtttttttaaaacttaattttattaattttttaaaacatttttatcttttaaatttttattttataaatggagggcccaatcacaatagagtccacaggttttcatttttgtataaaatggatagaaatagtaccttatctga

SEQ ID NO: 1329 - DNA, 501 bp, Bos sp.
taagaggtgaaataggaaacaagaaataataaaagagggtcagagacctataggactcagattggaaaggatatgtggggagacgacatgaggaggaacacctgttgtcaacagtcagagactatccatgtcccattgtgacacagcccagagctgtggagaatgtaaatcagcacttgtctgtccatctcaatttgaaaatacaggtggcagagtctatgcttgccatctttattctggtcatctagaayggttctttccttcctgtagtaaatattgcttattgattactcagaagttatgtctacttgtgccctctggctttgctctacctaaaaggcactaatatttgtgctaataacacaagctcttttgttctacatatcccagtgacaagaagggcagtaaaccaaagaacaaagaaaataaagaaagatattgataagttctatagcagcttatatcatttaatataattgggttttctttaaagatgaactt

SEQ ID NO: 1330 - DNA, 501 bp, Bos sp.
tatttaaggttgtctgataagacattgacaggggcagggtagacactaattaatgcgaggcaacttgattattgacaggcaggacctggtattgtgggcatcaagtcggccatctggtctgtacttcctgcctccatctctggttcagcagaacaaggttggaagataaaccaaggttaccttgatgtgtatttgtggatatgtagtaacatccacaaaacatgagttttatgctagaattaatgttcatraccttgggggaatgcaaaaaaaaaaagccttaggagagtctctcaaagagtaggccttttggtagaattccaaaaggccgtctacaaaatgcttgactgggaatgctgtctagcggggtcttaggttctgtctcttacaggtatgtgttgagacggattctccgccgggctgttcgatactctcacgagaaactcaacgccagcaggggtttctttgctacgttagtagacgttgttgtccagtctctgg

SEQ ID NO: 1331 - DNA, 501 bp, Bos sp.
aaagatggatgaagaaaatgccattgtacttggaaattattcactatgttgttgagtgaaaaaaaaactggccacaactaattcaactatttaaaataatacatctatatgtgcattttaaaaatattaagaaattaactattaagaaaataatattttaaaaagaaattgaaatgtacatgcctgatgacccagcaattccacttctgggtagagaaacgcatatgagaaaggagatgggtaaacagctkaagtatctattaataggaaaatggcttttacaatggtactataatcattccttgaaaatttggcagcagacaaaaagaaaattactagaacacttaagtgcaggtacccttctaaatacttaggcacgctaacataattctcaccctataaagtaggtattattgttaagccattttatagataaagaacagaaaagctaataaacttgcccgaagttcactgggccaatggtagttctgggactggaac

SEQ ID NO: 1332 - DNA, 501 bp, Bos sp.
cgaaaacaaaaatgaaagcaaaaaccacacaatttagagataagtcataaaaaataaaagtcatgtgttatttataaatcaatcatacagtaaaataattattttaaaaggtcacaaatacaacagttgcataaagtcagctttattttaagtgatcaaaaaaattttacctacttagtttttttgctgtcagagtgtactcagtgagttaaccaatgaattaaaattgctataagctgaaaaatactacraagttgacaaatctctgacctcatcaacttacacatttacagtatcaggtgaacactgggtgcagaattcagttcaccacttcactaacaagcatgaaagatcttgatgatcagaattttcgtgctgtgtaaatttagcaggcaattttctgtgcactaaactaatggtgcgtgctgcagaagtacataggaacccagattctgctgacacttttttgtggtcagttgccctaccctataatggttctga

SEQ ID NO: 1333 - DNA, 501 bp, Bos sp.
aaaggtggaagtcatatgctctccaactggataagaatcccaagggaaagaatgtaaaaagagaagactgttaattacagatgctgaaagaaatctatgtagaaagaaagttaatttgaaaaattgatggggtggtaggagaagatgtacatttaaaagctattgagatctttttaaaaaaatgattttaagatttatatatttggccataccaggtcttagtgaggcaggcagatcgtcagtcttctttktaacatgaaggatcttttagtttcgacatgcaggatctttagttgcagcatgcgaactcttagttgtggcctataggatctagttccctgaccagggatcgaacctgggccccctgcattggaagtgcagagtcttagccactggaccaccagggaagtccccaaactgttgatatcttaaatgttctcacaacaagaaagaaatgataaataattatgtggtagaggtgttagctaatgctatgatggt

SEQ ID NO: 1334 - DNA, 501 bp, Bos sp.; identical to SEQ ID NO: 873

SEQ ID NO: 1335 - DNA, 501 bp, Bos sp.
gagatcctaagaaaaagttatgaaaataacaacaattatactcattcatctaaacatgctgggtcaattcttttagggctcacctgctttttcaggttgatatcagtgtctagtgtgaagtattgacatggttttccaggtaggtatgtttggatgtgaattagaaatagcatattgaaaaggacattggaatttttcttatgattcagagggaagcattattagacagcatattaaaaagcagaaaaatyattttgctgacaaaggtctgtctagtcaaagctgtggtttttccgtagtcatgtatggatgtgagagttggactataaagaaagttgctgctgctaagtcacttcagtcgtgtccaactctgtgtgaccccatagacggcagcccaccaggctccctgtccctgggattctccaggcaagaacactggagtgggttgccatttccttctccaatgcatgaaagtgaaaatgaagtcactcagtcgtgtcc

SEQ ID NO: 1336 - DNA, 501 bp, Bos sp.; identical to SEQ ID NO: 1043

SEQ ID NO: 1337 - DNA, 501 bp, Bos sp.
ccttcaacattatgttcctggagaaataagaaccctgtaaatgcagtggaaatgttaaagatgacttgtaaaagcaaatcttttctaactgtatttggacccttagaaacctatcttctaaacagatttttggactctctggatgaaacacagacttgtgacttcctctcatggttgtttccacttgccatgtccacccctgggccaccatcctcctttgaagaaagtaattaatcaacctctatatcagrctgtacctgctagagaagcagctcacatagcatattcaaacacctattcccttcgtcaaacaatgaagttttccacgacaggatcagcggctaattgttgagggtgctacatgctggacactgtacctagattcatcccatccacctctcactggtcgtgtgatctcactggttgggtcaccagcagttcaatggtggaataactgagttaacatatgggaaatgcctgataggtacatttccatgctca

SEQ ID NO: 1338 - DNA, 501 bp, Bos sp.; identical to SEQ ID NO: 695

SEQ ID NO: 1339 - DNA, 501 bp, Bos sp.
gtgtttgttgttgctgttagctttttggttttttaaattacgggtagctcagaatataagacattcaacaaggcctcgatgtaaggaaggacaccatcctaagtgtttaagagccagcggttgctatgcagcaatagtaggttcagatggtgcaattagagcaattttggttttaaaagtttgaaaactaattaaaagccatattgtgaagaaacttgaatgtaagtatagattttatcctacatgcattyagcagccacttttcttttttcgactattgttatgggatcaaagaacttgattacatgaatagaggcaagggaaaatggaaccaagcagttaaaaaaatagtaaatgatagcaggatggataaacgacaaggtctgtattcaataccctatgataaaatataatgtaaaagaatatgaagacaatatatgcatgtataaccaactcactttgctgcacagcagaaatcaaacacaacattgcagatcaatt

SEQ ID NO: 1340 - DNA, 501 bp, Bos sp.
agcctgaacattgggccctcctagacaaactgggcttatctttccatctcctaatttagttatatctgcaaaatcccttttactaggtaagataatatatccacaggtttcagggattaggatgtggccatctttggcagctggggggaattatactgtatatttcacatctctacaggacacaagtctacaagttaacctcttcctctaaatttttttatatggctcagtcaatagaaagtctagtccartactggatttaagaacactcagtaatctctttcggagaagggaatggcaacccactccagtattcttgtctggagaatcctgtggatgggggagcctggtgggctgctgtccatagagagttggacacaactgaagagacttagcatgcatgcatgcattggagaagaaaatggcaacctactccagtattcttgcctggagaatcccagggacagaggagcctagtgggctgccgtctatagggtcgca

SEQ ID NO: 1341 - DNA, 501 bp, Bos sp.
attttaattacttttattgacaagagagtaggcccataaaaggagctaaattaatacattgtttatactacccaattgtctatggttgctaaaatattgtatgattacattaaaaatgaaatatattcttattttacattcatataaggatgcagaactacctgagtgcatattcctaaagattattaaaagctaagttttactcccttcaaaaatggtgttccattccactaaacaccatttgtggacartattccatagctttcttaccttgctttatttacttacctgagaaagatatgttgaagacccatcagtaaaaactggacgggcatatacaaaaaccggaagtggactttcgacactcgctattttagacaaccgaatggcttcctggacacgattacgaacatacaaggcagcattttgagtagattttaacctgatattcaaataaacagaagggaaaagggcagtgctttccttccacaaccactcgag

SEQ ID NO: 1342 - DNA, 501 bp, Bos sp.
ggagcttgctcaaacgcatgcccactgagtcactgatgccgtccaaccatcttgtcctctgtctcccccttctcttcctgacctcaacctttcccttatcagggtcttttccaatgagtcagctctttgcatcaggtgaccaaagtattggagcttcaacttcagcatcagcccttccaatgaatattcaggaatgatttcctttaggattgactgagcaatacacaaattttgacagagatagttaacgyggacatttgaatatgtcgcttcttaggcagtgaggcttgtgtaccagcatggggacctctgtttatgcttcatccacagacacaggcttaacagagtggatctgttcagaggtgacagtttcatcttcctcccttcttggaggttactctgttgaatagttggagtttgagaagtttattctttaatcttggaaacaaaaccactcttcttgttatggtaaacgtaagaaattcttttaacatctagcgc

SEQ ID NO: 1343 - DNA, 501 bp, Bos sp.
ctgttgttcgttccaattcatgattattcaagacaggaatttcagtgcagtaggggagcgtcagctgcagccctggtgagctggggcctgggcagagccagccctgggcagtggtcagctcacaccccaccccgccaagcagacagagtgcgctttgcttggttacttgcggtttattatgtttgtcttctggggagcattttgagttttgctctgaggcaggggcacagataaaagacagacagattaakgattaaaaggcatgaggtgattttgtgaagttctagtggaaaaccctggcctgggagtcaggagactctgccctcccatcacctcatctgcttttcacctctctggggttgactgaggccatctcagtgatttcttctgcttctgaaattcagtggctttcttgtctcgtaataaagtataaagggctattattactgtcgttgttcatatcagtggacaaagaagaggccctggagacattgaccagtg

SEQ ID NO: 1344 - DNA, 501 bp, Bos sp.
agaatagccctcgatcaccaaaaccagagaaaagcctgtcagcaacgaagacccagcatagccaaaaataaataagggaaaaaaagcagcagctgccccaggactctagaatcagaacctgaaaccaaaccgtgcccttaacatcagtccacatacaagtgctgcctttgttttccttatctcttctcctttatatagctccattagaaattagacttatatagatgacagtaattagggaatagtgtctrgtaacaagtatataggcagctccttggtagagcagaactggagtcagtcatgcctttaggaccatctaagtgtgggaaacagccatggccaatgcaaaaccaggtaaaaagtgccagcagattggcaggaagttaatctgaggattctggattttgaacttgaagggctaaagaattcatctatgacatcctctgctcaaaacagtcatttcagaagttctcctgcccattgatttctgatgttggagac

SEQ ID NO: 1345 - DNA, 501 bp, Bos sp.
atccaatcatctcttcctctgtctttcatcttattctttattaactaatgtaacagattgcctgcttcaaaggtgtgtatactcattaatcctttcacagttgtgccaggatgatttttctagaactcaaatattaagatatcattccttggctactaaaatcttcggttattatgaactcatcattgtctactggtaacaaactctaaacttagattgctatcaagatattaaatactatgcagcttgtstaccactccaaactcatgttccttcacttcttaaaatatgctacatgtgtatgtatttatatgcctgcaaccttattatcgcctctccccatttaccccctctcctcacaggcatcatgttgtacttatctttttatgtgtagttattatcataatatttagtgtaccatggagattaataaatgtagaatgagtggtaattaaggaaaagaagtctgatatccatgtcattcaagaggcctttccaaat

SEQ ID NO: 1346 - DNA, 501 bp, Bos sp.
ggatccttccccatttcaggaagctgtgccttccattcatgcccccatctaatcattattcaagtcatcctcacttcctccccttcctcttcctaaatctaacttggatatgaaaacaccagcatggtctggttccagaccctgatgcctgtggcagacaaacacaggatcagaaagcagaaacagcaattccctttatctcagagtctagtcaaaagacatcttcttgaggacaggggccatgtcctttyttttaaaaatcttgacaatcaatgttaaataggggctctctttaaaactttgaattctaagtccttctaaatgacttagaaggaacttaagtaactatttagtccactgggctttctgttgacatccccttgtcccatttttcatgggcttccctggtggctcagatgctgaagaatctcccgcctgcaatgtgggagacatgggtccaatccctgggtttggaagatcccctggagaagggaatggcta

SEQ ID NO: 1347 - DNA, 501 bp, Bos sp.; identical to SEQ ID NO: 874

SEQ ID NO: 1348 - DNA, 501 bp, Bos sp.
ctcttcagaatcatctgaccactgatggatgaatggaccccaaaccatctgagagccagagatctccaaatatttctaggaatgaatttacttattttcaaatatagactataaactttatggatttttcccttgggttgacaaaagaaatatttttgctgctgtccaaccaataaattttctgtacccctgacacacacctgaatttttagaggcaatcttctaaactaaaatttacacacacagtgtamattttcggaagctttcctcctgaaaagccaatttctcatacaccttgtaacaaacactgaccacatcctaaccaaagctaagtactgtgtaatgctaagcagacctgggcctgcaggaaataagatgccacattcaggacagctgtcagcacttgtccagcacctggccttccactcatctctcccctgcaattagccaggagggaggtttggaggtaagtggacaacttctaatccccaaataagaaag

SEQ ID NO: 1349 - DNA, 501 bp, Bos sp.
tcgattgctaagattatggttagagagtggtgttttctgctcttatttctggagcttccttcaagaactcattcacatcctctgtcactgagggtcatgcacccacctgggagacagagatggctgctgtcggctccacctctggtagtgctgggccgaaccagcacgtggaaacaagggcagcaaggtggtttgggtggccctcatatgccactgactttctgtctagcctttgataattcggtgacacyatgtcctatatttcacacctagaataatattgactccacaaaaaaaaaagaaggctttctccctggaccactggattgggcatgttaaaaaagatgacaaatgtagcacagaatctgaaagaaactactggccaagaggaaagcatgatgagtttatttggtgtgacttctttgaggaggaaggtggtggaccaccatttcaggcttgcctgagaaccacctgagtgtagacacctgcaagcttgtcccg

SEQ ID NO: 1350 - DNA, 501 bp, Bos sp.
ttttatattttaaaattaatcctcagaatcacagaaaatatatgtaacttttctaatcttccttgttttttgtttttacattattagtagtggcatgtctgtgggtttgtttactaatttactttggttccttagacttcatttagtatatagcttgttatgattggaagtgagagatctagaaggattgagtattgaaaaatattgatatactctcttactgtctcctcctttttcctcatccttcaaayaacaaaaaaattgtcagacatccagtaactactactaatgaatgacacattggaataatttaataggcacattgaatttcaagaaaaaagaagtcactttggtaccacactgaagctgttggccatcttttgttcattttaatggattgcttaacatcctgttactgttaaatttaatgagttcagctctgttctttcactatgagcatagagacaagattttaaaaagttttttttttttttttatcca

SEQ ID NO: 1351 - DNA, 501 bp, Bos sp.; identical to SEQ ID NO: 717

SEQ ID NO: 1352 - DNA, 501 bp, Bos sp.
atgtccgactctgtgcgaccctatagatggcagcccaccaggctcccccgtccctgggattctccaggcaagaacactggagtgggttgccatttccttctccagtgcatgaaagtgaaaagtgaaagtgaagttgctcagtcaaagcagttgaatattgacaatttcatatagttcctattgcataagtgagttgaatctgaagtggaaatgggcggtgctgcataatccttttatgatgagtaaatgcrtggtaagagtaaacaacaaagcagtctgtcagcatggaaacagattgtcatttataacatatctttgaagaaaaaaatgtatcttaaaatgttcactctacatactttatgggtatgtgtgtgtctgtacacatgcacttgaatatgcattagtgtacaaagattaaataattagtgtaatcgttagttttcaaatgacagcagtatcgaatttgactagttaatttttatttcattgtaggtatattaa

SEQ ID NO: 1353 - DNA, 501 bp, Bos sp.
tttttttttttttggaaagtgcttaaattaattgaacttgtccaatcaacttttttttttttaagtctccttcatagtaatatccattgggacttagaagttacacaaattgagtaactgatctgtaaagaaatactgagaatatagtgaatggtagcctttatcaggagagggcacatactagaatctttcttgtactcttttcttgagaagcgttaacgaaactcttggtggaacatacttgataacasatattcatctaacatcagggaaatgagaaggttagacatttggacctaggatactcaagacaacagtatatcagagctgtcgtgtttagttcactcaaacagaattttaagttactctaaaatttctttcaattagtgaaaccttagctctcatgaaaggtactagattgacaacccctgaggacactctactttgtcaccagcacagcagcagatgccacctgccagcagtccaggtatcacaagcccg

SEQ ID NO: 1354 - DNA, 501 bp, Bos sp.
gttgtcaacagtcagagactatccatgtcccattgtgacacagcccagagctgtggagaatgtaaatcagcacttgtctgtccatctcaatttgaaaatacaggtggcagagtctatgcttgccatctttattctggtcatctagaacggttctttccttcctgtagtaaatattgcttattgattactcagaagttatgtctacttgtgccctctggctttgctctacctaaaaggcactaatatttgtrctaataacacaagctcttttgttctacatatcccagtgacaagaagggcagtaaaccaaagaacaaagaaaataaagaaagatattgataagttctatagcagcttatatcatttaatataattgggttttctttaaagatgaactttatttcactcattacatgattatttagagtttattgtgagtaagacactgaactgtcattcaggaagacatatcttaagcaggagtgcagtattcttggcata

SEQ ID NO: 1355 - DNA, 501 bp, Bos sp.
cttagcttattatgttattacatactgtaggcatatttgtttagcagttttttaaaagcgtcaatgaggtaaaactaagtgaattagcccctcattaaacagtttcaaataaatagctttcccaatcaaatgaaaaactaactggaaaatatatatatactccaatgcattctgtttctcaaaagaagaaatacagattatgcaatcctttattatttaagaaaaaatctagataatacaggaattggcayacattcacgaggtctataatttccacactgttatttctctggcaaagcatacatatttagaattaaagagttgaaatagcgtatgatctttagtcatcaaacaaatattaactcatgctcattgtacaggcagttgtggaaatgcagtaactcacaagcaaacgttccttatgagcagacgccccatatacagatacccggaccctgttggcacagacctaagaactccccattcattccctctgtcact

SEQ ID NO: 1356 - DNA, 501 bp, Bos sp.
tataaattttaaatattgtgttagtttcaggtgtatagaaaagtgattcagttatgcatatacacgtgtctattctttttcaaattcttttcccattttggttgttaccaaatagtaagcattgtacatctcttttatagctaatacatttatcctctttcccaagcccttacatttctctatatccatatgtatgtttctttccagagacaggttcttcacataatttagtgggaagattgagcccaacmtcaatgtaactaatattaatgggtttccacatgtatgagatgaaaaatggagcaaccttctaattccttcatgcagttcttgttttggtcaatgataagaccagataacacctggctgatactggaaggagatgggagagtctttatcccctgaatgagggctgtaagtttgctgtaattttaaaaaataattcattcaggggacttccctggtgttccagtggttaagactctgcacctccaatgaaag

SEQ ID NO: 1357 - DNA, 501 bp, Bos sp.
taggcatcataagcatattaaattgccaaatgatttaggttctagagtacattgaaaagttcatctcttgatttacttaatcactactgtccatttgtaaatatgtatttcttttatgaatacattttctacccaagtactggtgtgctgcttcttgatgtaattacaaaaccctttactgataaaagcaaatgagaattacttctttaatcatactaccaaatcaaagagaaaacatttagaacattttycccctaaaatgtggcagaaagcaaaattattttgcaaaaagattttattcttatacattgaaaggagactaggcatgaagtaaattttattagtgtacagaaaatattatttccatttttacaacttttacgtgctatttactatgtgttgtgatgtacaaatcaaaagttttctacaaatagaccttcatcagagagcttaactattcaaccacaccttcctgtgggagatgttgaaatgaatttttca

SEQ ID NO: 1358 - DNA, 501 bp, Bos sp.
accccagcttttcaggaagatccctctcgcttaccctattgcagaacagcgtcccaggttactaactgagccctggctctcttttactgtggtcactctgagggcattatattttacattggactgttgctgtctttctccgccatgtacaagaccctttggacctaaaacattgagtggcatctagtagatatgtaacaaatatttgtttaagtgaatatttttatcccaattgatttatggtgagaaaycacccaaatgtatcgaaatatgggaacaattacataagttacattggggttggccaaaaagttcgttcaggtttttactgtaagccgttaaaccggaacaaagtttttggccaacccaatagtatagccatgtgttagaataatgtgcgaattatgatgtggtgctaagttccgaagcagtacaccgtgggaggacttcaaaattatgccaggtctgcaggaggagaccactggcctcctgacatgcagt

SEQ ID NO: 1359 - DNA, 501 bp, Bos sp.
ctcagaatataagacattcaacaaggcctcgatgtaaggaaggacaccatcctaagtgtttaagagccagcggttgctatgcagcaatagtaggttcagatggtgcaattagagcaattttggttttaaaagtttgaaaactaattaaaagccatattgtgaagaaacttgaatgtaagtatagattttatcctacatgcattcagcagccacttttcttttttcgactattgttatgggatcaaagaacytgattacatgaatagaggcaagggaaaatggaaccaagcagttaaaaaaatagtaaatgatagcaggatggataaacgacaaggtctgtattcaataccctatgataaaatataatgtaaaagaatatgaagacaatatatgcatgtataaccaactcactttgctgcacagcagaaatcaaacacaacattgcagatcaattatactttaataaaattaaaaataaaataagtaaaaatttaaaaatag

SEQ ID NO: 1360 - DNA, 501 bp, Bos sp.
tttaactattattagttgcagcatgagtgttgaatgagctgcattcacagaggagatattctgaaaggcaggaggcagtgtacatggaggaggtcaggcctgtgatcagaggaacattttgctggagatggtgatgtgcttttgcacatcatttgtctcctttgatccacatttctcgtgtgtgtgtttgtgtgaatgacttttcattatagggtttgggtaactgaatgtaaaccctgcttttggtgaarattgataaagttatgaaaatgctcagagatgataaaaatgagacccctttggcctggtgtcccagaagcatatccattgtagagcacttgctttgaggataatagacacatcagaacgagatgatggtttggaagaagttgccgttgtgtagttgatttgaacagtggagaatattaactgtttttcagggaaattttagtttatttgtaaatttaggacttttttcccaacaatttatttgacagtttt

SEQ ID NO: 1361 - DNA, 501 bp, Bos sp.
tgtattaaggatatcagccctgatcagcggatgttcagtgagttcagacagccattttgtacattttgtccagattccgcagcatttttttggtaggaaggttaagtccaatgccagccacttagtcattctcagtactggaaatcaatggaaattctagaaaccttctaataatatattctttagtgttttttttccccagaatatagtgtaaaagtatgggaacagcatttgaagagtctaaatagttracttttccctttttatctccctatgaattgagtttgtttacaccgtcaagttttctttccactttacaaagcctattactaacatccactccatcaggaaaagaatgcatgtttctgcttccatttttaaaagaatatttataaaaggaagaaataagcaaatagataattcagataattctgtttttacacatcaaccctgacattaaaggcatgacccttactttctaacgtctgtttattgagcttt

SEQ ID NO: 1362 - DNA, 501 bp, Bos sp.
gggagttgatagacagggaggcctggcatgctgccgttcatggggtcacaaagagtcagacatgactgagcgactgaagtgaagtgaactgaaccaaatcctctgtcccaaaattctgcccttggttcttgtaaatctgatatccacccctttcaaatctcatgaactctgatccttaaagatagttacaggaagcccagtgcacctggcttctgcttcttttcacccacaactgataaaaagagatgccycaatatttcaatagcttaactgcttcaattaaaaacaaccatgttttggtagagcaatcttttcacaatgtgttcttaagagatgaagaccttaagcattaccccctgaattagccattctgtctatcagaaaaaaaacactcccagaaaggttctattcaacttccccttgattaaaagggggaaatgggaaaaaacaaaaaaacagaaacttccctggttgagagatcagaatgggaagctgtcatgc

SEQ ID NO: 1363 - DNA, 501 bp, Bos sp.
tttattctcattaagtaatcatcataaaatatgaggttcatgttagggattatgctaccagacaagttgttttgttgttatttctcacatattttactgtggtgaagcattataagctaataatccagctgacttgaaaggactgttgagatgatccagtcagtgctttgtgaaaaacattttaagccacagacccatgttttcaaatggatgttgttcaggtatggaaataaaacttctttgaaggagtraaatgaaaaagaaagcggactgctctgactgagacaggactgggggcccaggtgcctgggtgtggccccgccaggctttccctaaagatggtctttagaacccctggggcttcttagggccgggttctgtgagccgctaaccagaccttttgattttattagtacaaagagcagcagcagctgccacttattgacagtttgcagtgtgataggtgttctctcttactgctaatgattgtggtaaacctgc

SEQ ID NO: 1364 - DNA, 501 bp, Bos sp.
gcctaaaagaaaaagggaaaacaaaacaaaatgaaagctctgcataagcaatagaaaaggtgttgacactctatgtctgcacagatccagtgcactgcatggaacccttgaactagctgtacaactgtgacatgttttctgattcaattcttttgatctcccgccctgatttccagggtcttgctccaaggaccttctcttgacttttcagaaaccatgtagagcgctaaataacagcaaaaataattccmgtggcagggtaacttaatgagatgttaatgtgcattttatcattatttttcacttctttttttgtgtcttcctaattaaagaccacataggatcaaaagatgaaattaacagatgtgtattactaggttttgcttgtgaaaaactgaacaaatcaaggaagataaactatagtgagacatttctagtttagggcactgtttgaggtctgacctctcactgtctcaaggaggcatctgggcctgaaagtaa

SEQ ID NO: 1365 - DNA, 501 bp, Bos sp.; identical to SEQ ID NO: 875

SEQ ID NO: 1366 - DNA, 501 bp, Bos sp.; identical to SEQ ID NO: 876

SEQ ID NO: 1367 - DNA, 501 bp, Bos sp.
  misc_feature (1)..(9): Nucleotides uncertain from position 1 to 9
nnnnnnnnncagtccatggggtcgctaggagtcggacacgactgagcgacttcactttcacttttcactttcatgcattggagaaggcaatggcaacccactccagtgttcttgcctggagaatcctggggacagaggagcctagtgggctgccgtctatggggttgcacagagttggacacgactgaagcgacttagcagcagcagcagcagcctctaaatatgcacagacttgtgaatactttgaactrgggaaatcttaaagaacacctaggtcatcattgtttttgcagaggaagtcactgagccccataggagtgaagagatgtgtcaaggtcatatgaccagtctggagcagggaaggataagcagcgctagcctggctgtctttccagctgtctgcgtctggcctttccctattgccattctgcacatactgtaggaaagaggtgggtggacgttcagggaatgcaaactcatgctaatgtttgaatattaaaa

SEQ ID NO: 1368 - DNA, 501 bp, Bos sp.
gggttgcagagtcagacatgactgaagtgacttagaatgcacagacgtattttgggggcagaatcacaataaatgtctagttcaactctcaggcaagaataatgtacatccagtttcaaacattacatgaaagagacttcacagctttcccctaaatgcatttgaagataattttcttgttgttttaaaattcatgaactgtaacagtcacctattgaagaagaatgaactagatcaactgtatagatgcstatcattcagatgttcagaaaaatatatttgtactagagtttataatccattgtaatctgatagatagcaagtatagtttggacagctgttctgggagaagttctctgatagctggaccactttaatcttattacattaattacagtaggactcagatttacaatctaaaagggttaagtatacgcgtgcatatacatatctgcacacatatatatgcaaaacgtatgtagacatataagcatatgtagc

SEQ ID NO: 1369 - DNA, 501 bp, Bos sp.
actatgccctggccattgtcccaagtgccttccataatttctttccaacttcacaagtacaccatgaaataggtaaatagtctcatttgacaggtaagccagtctctggcttaagcacatataaatgacagaactcagaatctgactttctacagtagtcaacacactcaactttgatcaattattcatttaccacttccagaaattttcctgtatcaccacctgagcaatatcaactgtacagtatatakagagagaaagagagatttcaatgtaattcaacataaaatgtgttatatatttataactattatacaattatgtacatatgttaatcaatgtaattaggtatattaatatataaatatatgatataaacaaaataattgttattacatatagctaaccattactacttactctttctttgacttaaagagaaaaccgtattacagactaaattgagacttaatcttttgcacattcagaagaattgaaaga

SEQ ID NO: 1370 - DNA, 501 bp, Bos sp.; identical to SEQ ID NO: 877

SEQ ID NO: 1371 - DNA, 501 bp, Bos sp.
aaatcccattattacagtgaaaaaataaagtcttagttttccaacaatagaggccagcttgataaattacagctcacccttacaatgcatattctgccattattagtagtgctgtatagagtatggcaaaatgttgacatttgttgaagctaagggatggatacatttcattttactatcctctttacttttatatgtttgaaatttttcataataaaatgcatataaaaagatggatgaagaaaatgccrttgtacttggaaattattcactatgttgttgagtgaaaaaaaaactggccacaactaattcaactatttaaaataatacatctatatgtgcattttaaaaatattaagaaattaactattaagaaaataatattttaaaaagaaattgaaatgtacatgcctgatgacccagcaattccacttctgggtagagaaacgcatatgagaaaggagatgggtaaacagcttaagtatctattaataggaaaat

SEQ ID NO: 1372 - DNA, 501 bp, Bos sp.
ctcaaaatgtgatgcgagagtcacaaagtgagcaaatgctgttgaaagaaaaatgatgtcttgttcaacacatggccgcccataaatttgtaaaaaaacacagtatctatgaagtgcaataaagtgaagggcaaaaaaatgaggtgtttgtactggatcgagtttactaatattttgtaaattttagtatgtttacattttatttagcattagcattagcctgcaatttactttctcctactgtctgggawcttagtaacaattcttacataattctcataaaaagaaaggtcaagtgcttttcttattttataatatgaaagaggttggaaaacaataaatttttctctgtttaaaatggctgagtgttagtcactcagtcatgtccaactctttgcaaccccatggactgtagcccgccaggctcttctgtccataggaatctccaggaaaggacactggagtgggttgccatgtccttctccaggggatcttcagacc

SEQ ID NO: 1373 - DNA, 501 bp, Bos sp.
tgcacttattagttttctgcctaggcttgctagagtgtatttcgtctacactctgacatgccagatggccacacaaatctgtgtccggcaagctcctcatgtgactttgctgtctggaggctgcagaacagaggttaggggtcactgcatatacagactgcattttctgcctaaagctcagttgactggatgaattacaattaatcccaaggacttcaattgttaacacagtgcaatgttaattgaccccmtgttaaatagcaaatatttgcattgtctctagagattcatcttaacaggaaattagatcacatttgaatatggaaactgtccagggaattaactgttctttttacctggacaactcaaatgatgaattctcttggcatcttttaaaaatttcatttcattgttattgccatatgagtgtactcaatccataaaaaattatacattacatgtaagatggtggattttggtatgttttataagcttaatact

SEQ ID NO: 1374 - DNA, 501 bp, Bos sp.; identical to SEQ ID NO: 436

SEQ ID NO: 1375 - DNA, 501 bp, Bos sp.
cagcatcattccttccagagaaatcccagggctgatcttcagaatggactggttggatctccttgcagtccaaggaactctcaagagtcttctccaacaccacagttcaaaagcatcaattcttcagtgctcagctttcttcacagtccaactctcacatccatacatgaccactggaaaaaccacagccttgactagatggacctttgttggcaaagtaatgcctatggctaattcatgttgaagtttgwtagtatacatttctagtgaagtcatctggacttattacatattgcttttgttgcatgcaaatgaggaggcaagatcttaaaatacaaatgcaaattctatactagatatacgtctcctcggattatctatttcaccttatggtgatttgatacttctgtctttcaagaaattgttttcatttcaactaagttgctacatttgttgacataaagtgtttaaccatattttctcattattcttttaatacac

SEQ ID NO: 1376 - DNA, 501 bp, Bos sp.
atttccctgtttgtacaagcatgattttcctgatcattaacaataaaacttctctatcccattgccctagatagttccctctttctattagacatgtcttctctagcctttgctactagaaaaacttgacttgtatctgaaagcagaagtcccattgcttttctcagtgattatttattgctataaaatactgctttgggatgggaagatcctcataaaggtagagaaaaagtaattcccttgtacttttmtatattatccactgcatccctaaaatattacagagaacttctgaataagcaaaaatctgtctatattctaaaggcattgtggccttggaaattcagttgttagcttgcttatgaaaattctaattacttttttatataaaacctatagcagtaataattatttatcattgcaaaaggcataatagtttgcattttggttttcattactttatttaagcctcacaataaaactgggaagtagtattgatgt

SEQ ID NO: 1377 - DNA, 501 bp, Bos sp.
cttctgatgcatcctacccctcaaacccgaattaggaaccgacccatgtagtaagccaggtttgcagcacgccctttcagcattgcttttttttgcttcaagcagaaatcttagattatgttccagttttgggttatttttagggaaaccatacattttctgacttttgaaaaatgcaagcactcagagtgctttgcacacagtatgcatggaatatacatcttttgaacattaggtaaatcaaactctcyggcgtattttgagtataacatctcaatatattaaatattcaggacagcagtatctcctcaaaaattttaatccttgaatgcagaatgaaatataaacacttaataatagtgtcacttatcacatactgagttttatttacatcagtataacttagttttaggattatgacatattcttgaattaggtggcttttctcattcccaaagcagcagtctatagtagtcccttaatacttatttttataattgt

SEQ ID NO: 1378 - DNA, 501 bp, Bos sp.
tacaacattatgcaaaacttctgaaagatcaagacattagcctgaacattgggccctcctagacaaactgggcttatctttccatctcctaatttagttatatctgcaaaatcccttttactaggtaagataatatatccacaggtttcagggattaggatgtggccatctttggcagctggggggaattatactgtatatttcacatctctacaggacacaagtctacaagttaacctcttcctctaaawttttttatatggctcagtcaatagaaagtctagtccaatactggatttaagaacactcagtaatctctttcggagaagggaatggcaacccactccagtattcttgtctggagaatcctgtggatgggggagcctggtgggctgctgtccatagagagttggacacaactgaagagacttagcatgcatgcatgcattggagaagaaaatggcaacctactccagtattcttgcctggagaatcccaggg

SEQ ID NO: 1379 - DNA, 501 bp, Bos sp.; identical to SEQ ID NO: 878

SEQ ID NO: 1380 - DNA, 501 bp, Bos sp.
gaaacgatctcaccaaccgaattcacaaggtcaccctggcaaaggtgatagggagagttaacagggaggaatacaatgaagtgttatacacaggacagtaacgccaaagccaagaatgctaacccaacaataattatgtaagtatttctccactattcatttctatcttttatgccaccactgtcctactataacaaaaacatgaattttctgctactattttaattacttttattgacaagagagtaggyccataaaaggagctaaattaatacattgtttatactacccaattgtctatggttgctaaaatattgtatgattacattaaaaatgaaatatattcttattttacattcatataaggatgcagaactacctgagtgcatattcctaaagattattaaaagctaagttttactcccttcaaaaatggtgttccattccactaaacaccatttgtggacagtattccatagctttcttaccttgctttattta

SEQ ID NO: 1381 - DNA, 501 bp, Bos sp.
tagctttagagattttattaaatataataagcaagaagctgggatggtgctaatgagaccaaaggctggtggcaagcacagcagaatcatcaaaaacacaagatgcaattatcatagtgattatctaggtaaacttcctaacaactcgagagtgaaggcaatgaatcaaattcttaaagaaaaggaaaaagactaggccccaaagtgattggccaggaggagagagacgtgatgtgaatctcaaattttcyacaaagtttttggcaaataaagtcccagcgcataaaatgcaacactgagcaaaactgggtgaggctgcagttttgccaagaagtttttgaattatactccagtttgtctccatctatggcatcatagttcccctgagcagcctaagccaaattcctgggagctgtcctcgatgcctttcttcacttctaatcgatcaattacttttactgagtttctcaaaaaacaagttttgtgcccctcccctgtact

SEQ ID NO: 1382 - DNA, 501 bp, Bos sp.
ggtaaaatatctgcctatatttcttatggggtcataaatgggtacacttggagagcagaaaggtttctgttatagaagaatcacttaatgcttttggatgaaagaaagatgttttaccagtctgtttaaaagtgaatcaaatatctgaaagagcaaacgtttctgtctctgacatcctgtgatttgctaatttctactataattttcacgatgtagaagttaaaagccagacataggttttttgttttctrtttcctaatcagaaacattctgttgcacgtataattacaagtatttgtctataaaaatttatatcagaaagctggtatgtgagtgcagtaatggcgttcctcttgctataatgagtggactttgcaaaacaacaggcgtattggaaaagaagtgacaaaggacttttaaaagttgaattagctgtataaactttaaacacagaaacttcaaacacactttttctctgaagacatttgtggatgaattaaa

SEQ ID NO: 1383 - DNA, 501 bp, Bos sp.
gacagccaaatctaattctaagtgacactcacatcaattcccataacatgtacattaaatctctatttttcctttatttttgtcaccatggatttgagtttctttctgtttagcaaaaaaagataaacattttttcatagttatcttctagagactatgaatctgtaaccttgagattgtattaacatttgttcctagaaactacatttactcaagtatttgttacagtgaattgtttattcatttcaaartgtaaactacgtcatagcaagttgattttgttcatcagcctcaggaaattttactgacagtggcttggagctcgtcataattaacccacaaaaatcacaatacagatactcttggagacagaaacgtatctcaaagacttcatccttgcaaaagttctcttataagggattttagctattttccctcaacgttattgaggtagagttgatgcataccagagtgtaagtgtggggtgtacaggatgacact

SEQ ID NO: 1384 - DNA, 501 bp, Bos sp.; identical to SEQ ID NO: 879

SEQ ID NO: 1385 - DNA, 501 bp, Bos sp.; identical to SEQ ID NO: 851

SEQ ID NO: 1386 - DNA, 501 bp, Bos sp.
cctttgcttttttaaatgattcagataacttgtgagctctgtcactaatcctctaaaacctttaaatagaatataataattgtggttaaaaaaaaaaaaagacacatagctaactacagagttaacttgaatattccagatttgcatctgttgtgggccctactagcaaaatgtgagcctgtaagtcacaaacattaaatgtaggaaatacctaacctgcagatgactggggaattctttaagcgcatgcraaatatgtatttacaacttgttttttgtgaggagttagacaaaacataacctgtggtggattcattttgatatttggcaaaactaatacaattatgtaaagtttaaaaataaaataaaattaattaaaaaaaaaaaaagtagccatgggtagtgcttcagcatttagcttttcctttatgaactcagtcttttagtcttcatcaaaatgaagtaggagtttagaatagtacagccacttaggaaccagtt

SEQ ID NO: 1387 - DNA, 501 bp, Bos sp.
tatagaacactgttagtcaaaacagaaattttgagaatttgggtagcaaatgcttccattttagttaataaagaacaaaatttttaaatttacatgtgttaaatatccaaatgagagtatcctaggacaacaccatttgtctgagtgtggagaagggccaaaggaacaagaggatgtacatggggctcttaatactggttcccatgatgagtgagataagagatgggttgacaagcaaatatgagatcatycatttttaccaaatgctattatctttcccattaaaatacgtatccattttttaaataatttaagagataaagactttaaaaaactgaagctgtagtaacaatataaggttaaggtcatgtggaaaaatcctgatgtgaagccatttcacttatgagtgagagaaatgttgtgacttcagagtgagtcacagcacactctgtgggcttcactctgttgtgacttcagagtggcttccagcccttcaatgct

SEQ ID NO: 1388 - DNA, 501 bp, Bos sp.
gcgctgccattatggtgattgtcatggttctatataaatgccctccatctgtccctctactgttgcatgttttcggtggtttggaagttttgtatatttattgtattaacacagagtgtcataaaataaaatgctgtttactggatgtttgtttgtgtaattttaaatactgtattagcacttcagaggcagtaattatacagaggactcaatgtatatagaaataccacatttgattttttaaaatgacrtgacagttcttctgttggtttagacctttgtaggtagtggaacatgagattcactagttaaatagttcgaccactgtaaggtcaaaatacgcagactagaagctagattgaaaacagaaaacccgtgttgtggcccagacctcccctgcgggctcacatggacgcctctgttctagtattgtgttgacgcgattgggcttgttttctgttccctaaactcactacctgttgttgttttatgtactgatga

SEQ ID NO: 1389 - DNA, 501 bp, Bos sp.; identical to SEQ ID NO: 1131

SEQ ID NO: 1390 - DNA, 501 bp, Bos sp.
tgtgtacttcagtgtgtgagacctttttttggggttaatctcataataaaaggaaagtaattcaacacgtcttagttttcagtatcacttaaacattcaaattttatttaatctcttatttgacataaatttctctatatttgacttcttaatttctacttatccttcaccatctaagttaaatgtcatatgcaccaaaattccttttctaaaacttagtaagacttggcaccaattgccaacattgctasttgtctttctgatttttttttttttttttgcatctcttagtcttacaaactactgcacaattgcactcatctcacacgctagtaaagtaatgctcaaaattctccaagccaggcttcagcagtacgtgaaccatgaacttccaaatgttcaagctggttttagaaaaggcagaggaaccagagatcaaattgccaacatcctatggatcatcaaaaaagcaagagagttccagaaaaacatctatttctg

SEQ ID NO: 1391 - DNA, 501 bp, Bos sp.
accacagtgttcgaattcatgatatgagtggactatttctgagggggagaaaaaaaaatcatcaatgatgatccttttgactcctactaatatttagccaaatgacatagttgccagaggctagacctagcgaaatctaatgaaaggggtcacatttcagaataattttgataactattcaagccttaatgagctcttctaaaacaagtaaagccactttcactcaaaggcataggagacaattaggaagmatttttttcttgcatttatctttttgaaaaacaattgttgattggtttagaactttaagcagtaatttactaagggatgaaaggattcctaaagtttctaaaatgtctattttgcaaccagatgtgttttaaaaggtaaagttaatctgtgcttaaatagaataatattagggcagatcagatacttgaagagccgtgtaatacactccctagtacctaagcattcaccatgtgacttggtggtcatcat

SEQ ID NO: 1392 - DNA, 501 bp, Bos sp.
tggcaacagtggtaaagaaccctcctgccaaagcaggagacaaaaaagaagtgggtttgatccctgggtcgggaagattaccgggaggaggacatggcaacccactccagtattcttgcctaaagaatcacatggatagaggagcctggcgggctaaagtccacagggttgcagagtcagacatgactgaagtgacttagaatgcacagacgtattttgggggcagaatcacaataaatgtctagttcaastctcaggcaagaataatgtacatccagtttcaaacattacatgaaagagacttcacagctttcccctaaatgcatttgaagataattttcttgttgttttaaaattcatgaactgtaacagtcacctattgaagaagaatgaactagatcaactgtatagatgcgtatcattcagatgttcagaaaaatatatttgtactagagtttataatccattgtaatctgatagatagcaagtatagtttggaca

SEQ ID NO: 1393 - DNA, 501 bp, Bos sp.
acttttcattagggtttgccctgtctttgacattttcttttaaatgtgaagtggtcttaaaagatctgcaaagagtatctatccttcttataccctgtcatagtccccccagacatttgagttggcttacaaaccaaagaaatggagaaaaaggaaaataagagaggcgagcaagcaagaacagagtaggtgctttgaagaggatgaaaaagtctgtttttgctttactttgtttttctgatgagagaaaragaagaaaaaccatttactcttctgcccagatcacatttaagttatgagtttgtggtggaggaggtgaaaataaaataaagaattcctgagtctccatcctgtgctctaaccgctagactgctgctccctgcttagttttcagaaatgtatttcatccatactaaacttgtttgatacgtaaaatgagtttaataaacttaaaagtcgtataaaaataaaatatgatttatcagtcaaaagaatttcctg

SEQ ID NO: 1394 - DNA, 501 bp, Bos sp.
tccaaactcctctgtgaaggtagtccccattgtagccaccttttcatagactcttagctctgggaaggggctacaggaacctttgggccctagtgcctcatctggcgggaggtggacacagccctctagatggaaaggccctgattcagcttccttgctgactgtggctgaagaactacacttgagatcttctaaccaaccacatgtgctcttttcaccagaaccagtgctaatcctaaatctgtgatacrgcagattaagaaactaaaaagtcagtgatcaatcatagtgatttatttgtacaagatcttcagactcctactccaagactcaggcttgatggtctggaggctgtacaatttctaacattcacacaagttttctagggaagccagaagtgccgggtaccttgaaaagaaggtgaattgctcaagaagggagcatggtttatggacaggaaatccaaggtcaacatgcagataggctagcatgtagaggcca

SEQ ID NO: 1395 - DNA, 501 bp, Bos sp.
aaaaacctccaatggaatataacaaatcaccaaccatatcttccactgtgaaaaataactagtacccaggtggcttttttatttttattttttcagaattatatctgcttgctcattttcatttttccagggaaagacccataggtttcactaaatcctcaataagtctgtgatttttgaaagattcagaactattcctaggtggccctgaaagaatatcaattcaaagttcaattcatctggtgtgaggyagagttttaccttattttttaaaaagattcctaaaagggcaaaagcgctctgaatcatttggtgttatcagtgtaagctcaattaccgcctcgaggaaatgctttcgaactcccatccatggactagcaccacctcctgcctcgcccccaggtgtcctctgcttccctactctccctgaaacgtcagagattatttttatatccagatggcccccaaatcaatattcagagatctgatctctttcccaga

SEQ ID NO: 1396 - DNA, 501 bp, Bos sp.
cattttcataaatacacttactttcctcctttgaacaggcacacctgttttctctactaactctgttgcttcggtcacttatgccctagggaaagcagttgtaagaaatagcagatgcagaatttacacagcagagagcattccatcccttcagtttacaaagtctgcagaaaacaacccagtggtgcaggactattttatgaactgtgacctcaagccgctcattgaaaatgcagttcctatcaaattgytctttgcagattttcattttaaaatgatgaacacgtttggggttagttacacttgaaccggccacacttgcatcaacaaaaatcttcgcaaaaagtttacattgtgtacactattgcctgttttacagatggagaaactgaggcacaagtaccttaccccaaacttctgcaaaatgacacagaacaaatacaacctgcccatagcacgtgacaacatctaaaaaggaactaggtgtgttcctgctaagcg

SEQ ID NO: 1397 - DNA, 501 bp, Bos sp.
tcaaagtagaaatgttttcatctgtttccacatctattttcatcatttcaacttaccatagataagcttagattgagactgccccacattataatcccagaggcacctagagaaacgatctcaccaaccgaattcacaaggtcaccctggcaaaggtgatagggagagttaacagggaggaatacaatgaagtgttatacacaggacagtaacgccaaagccaagaatgctaacccaacaataattatgtragtatttctccactattcatttctatcttttatgccaccactgtcctactataacaaaaacatgaattttctgctactattttaattacttttattgacaagagagtaggcccataaaaggagctaaattaatacattgtttatactacccaattgtctatggttgctaaaatattgtatgattacattaaaaatgaaatatattcttattttacattcatataaggatgcagaactacctgagtgcata

SEQ ID NO: 1398 - DNA, 501 bp, Bos sp.
tgtattgtttattttcacctaaaaattttgcttttgtggtataaaactagttgatacttgttaaatagtgcctaaaagagggctctatgtcctgaatggcatataaacccacgtttgttttttttttaactttgtttgcaagaaaccgtgattccactgttgttactcactataagtaattaatttctactgaaactgtgacaattttcaatggcatcactcaaaattagcaacagttaaataaattaaastccagttcagaagtcaagtcatgttaacaggatatccaaggttgaacacactcacacaggtttgggttggtgctaagttcaggagacttaaggacacagacaccaaatttttctgctgtgtagacagaagaaaaattaagggaaataacaatgcaatttaagttttctcatttaagtctcttttcatgcacttagaaaccaattccaatctcatatgccatctaatgttagtatcttagaagactgttta

SEQ ID NO: 1399 - DNA, 501 bp, Bos sp.
tccttcctgatatatatacatatatctatctgtatgtgtctagatgtttatattctgtctttgagattttaagtatatttgaatgtagtgcgtatgttctaatattaacatattctctcatatataagtatatgcagttcacatatatctcatacacatatgtatttatgtgaatatatatgtatatatatttcattttattctctcctaggagaacactagagaagtttagtcaaatttctgtgctttaratttactttaaatgtttccttcctttgcacatatgtcacgaactcaattcacaattagattcctttgtttcactttgcttttatttataaacattcctttttaaattttatcttgttctatatttaaaattttacctggttccaaagtgatatctagaaaatcagatgcatacagagaagaaaagattttctccctgttctctccaccttgtttagcctcttcctcaataggtcacaattttacatcaaa

SEQ ID NO: 1400 - DNA, 476 bp, Bos sp.
tactcagaagttatgtctacttgtgccctctggctttgctctacctaaaaggcactaatatttgtgctaataacacaagctcttttgttctacatatcccagtgacaagaagggcagtaaaccaaagaacaaagaaaataaagaaagatattgataagttctatagcagcttatatcatttaatataattgggttttctttaaagatgaactttatttcactcattacatgattatttagagtttattgtragtaagacactgaactgtcattcaggaagacatatcttaagcaggagtgcagtattcttggcatacattgaatttatttacttgtatcttattcctgtcatctcttggctgacaactgacaggatttttattcttaactttaaacacgttaccaagctccaacactcaagcttttgatgctgttactctatattaatgttgatgccattaacatctctgcaggtg

SEQ ID NO: 1401 - DNA, 501 bp, Bos sp.
aattatttctttcatttctgaggttataactaccaatattcatcacatttgcaattaaaacaaagacacctaaaatatttattaactagctaaaagtaacaaaaaaaaatccatttgatgttaacatgaataacattttttgttaaaaaataactatattttacaaaacaaaaaaatatttagtgagaagagtggcactattttatatgtttacaaatctctttcctatatggtttgaaagaagacagtgrattcttatatttagttgtgcatattgagagtcccttggactgcaaggagatccaaccagtccattctgaaggagatcagccctgggagttctttggaaggaatgatgctgaagctgaagctccagtactttggccacctcattcgaagagttgactcaatggaaaagactctgatgctgggagggattgggggcaggaggagaaggggacgacagaggatgagatggctggatggcatcactgactcgat

SEQ ID NO: 1402 - DNA, 501 bp, Bos sp.
cagagagcttaactattcaaccacaccttcctgtgggagatgttgaaatgaatttttcaataattattcttttcttttcatttaacaaatatatattgtgttctcattaggtaataggtacaaggctatgtgaagcagttacagggtcccataggaaagtcccaaacttaaggagctcatagtcttagacagattgggacaaatttataaatttcagggctcaaagcaaaaaaaaaaaaaaaagctgagayctttgtttcaaaaacaggaaagaggtgacattaaatgtaataaaacataaagtgtcattcttgacccatgatttttttaaacttgttatttcttttgtccttatttccagtagctcactgacccaacccccaatggatagcctacactcaggagcttgtgatctgttcaagcactgtttgatttctggaccagcaatgaacaaatcactctgaatgcacagtgatatgccagcctagggttgagacttcc

SEQ ID NO: 1403 - DNA, 501 bp, Bos sp.
ggattacaaagtggtctctcaagggaagaagtagaaactccgtctgcactgctctgggaataggtttgttagttaaattatactccctttcttagctgactgcttgacatttcagcaccagaaccaaataattcatgggtcaactaggaagagtgcttattataatcatcttttaaaatctccaccaacagcagtgaactagaaaaaatatatagttactattttattctatgtgataaagtctgtcagaytttttagagtataaaatctgttcttcaataccctctgattgctttttaaataatcgctgatatccataaaaaagaatgtcctggcagtgctgagaaaatagcatttgagagttgactagaaataatgaggagggattgtgtccactgtttgtaacaaaactgctgcaagaatctgaaccatcacttagacttcaaataataaccttgctaataataaactagattaaagccaacaacaaaccaaatgact

SEQ ID NO: 1404 - DNA, 501 bp, Bos sp.
cttcccaacccaggaatcaaactggggtcttctgcattgcagatggattctttatcaacttagttacctgtttaaatgtaaagaaattgtagtgtcaggttgaatacctagaatctccactgaattaacaacatggaaaatgatcaaaacagatgacttgtttgtttaataagatcgtcacacacaaaaaatcaacataaaaacattctacagctttttaatgcaacaatgccaattataaaatgtgattwaaaaaaatcagcttcctagtacctatatataagcctagcaagagatatgcaaaacatgtacaaagggatatatacaatttaactgaaaggacttaaaagaagactagactgaatggggcaaaagaactatattcttggatgggtaaacataatgtcataaagttctcaagtctttttaaattaatctgtggcttcaaagcaatacaagaccaactcctaacaggatttttttggtgtgtttttcttacag

SEQ ID NO: 1405 - DNA, 501 bp, Bos sp.
catttaggtgatattaacacagcagatattttggattcagagggccactctaagtgtttttctctctctccctcacctccttgcatctgttccctttctccctcgcagtttgctcctgatgcaaaatgcgattgttacttgcaattttagtttgagatatgaacatttggagttatgtgtttttgaaagaaaatgaaatgtagatgggtattttgtaccttcaaaataagaaacaaatagcactttctaawatgtttgaaaattgtttcagattcaaatttgttttgcagagtcaaacaagtgttgcttgtcatctttattgtattaattgtttggaaaatgagctaggctccgcagtgtgctctgactcacagcatttgcatcctgtttttttcttatacagttgctcttggtggagggaagactgtcagaagtggtcagcccgaccttactgactgtgggctgcacgtggctgttggccagctaggtgaccgtgttgat

SEQ ID NO: 1406 - DNA, 501 bp, Bos sp.
gtatccgctgtgtaaggagctaactcaaatgtgcaaaactgtagaaaagccatgcacagtatttttaacttccaaagaagagaaaggaagcactggcaatgcttcattttactttacactgtgactgcaggtcttgcccaaggtcacactttagtaaatgtgcacccagcactgttgcagaattataaatggtctggaatagaggccattgttcgctgaattctatttcagtatctgaacatgctatcacygtgtaaaacagatttctttattacatgcaagaaaatcataatctctttatttggggacttaagaagataaatacttaaacagtaaaacaactgcttaacacaagcttcaatgagtgataagagaaagctcaaatctcccaaagtgaaacctttattaaaaatactattttcagtatttatggttattatttacagtatccatccaacgtcaaataaaatgcaagctcttttatatcctgtggattcgttt

SEQ ID NO: 1407 - DNA, 501 bp, Bos sp.
aagtgagctagctggcctggtttccttttggaacttaaaaaatctctgattataatgtgactctgtgataggtgttttatgatgtcattcatagataaaatttataaagtatgttgtgtgtatatatagtatttatacacacaataacgatggcaatattaaacaagtctacacatacaaatatgccaaggttgattagtttgagcctttcttctccagctggtaaagtcactccctatatagaaaacatrcaggaaagataaatcaattttaccaaaaatttttctaaataaaaatcatagtaaacaagcagagaaaggatcaatttgagaatccaataaataaaaataagcagtcataataatgagtattctttattcttataaggaaatacataaaataggctttcttcagtttatattacaccttttactcatttaacaaatatacttactggatgactactgcataatgctatgtttgctgatgacttcatccaca

SEQ ID NO: 1408 - DNA, 501 bp, Bos sp.
tttctgttacagctaatatgtttttaaataattactgtgtcaggaactgtgctaagagctttatggtcatttgcttatttaatccttacaatagttttatgagataggtattaatgtaattatcactattacttctactactactactattattattattatccccatcctaatgtgaaattgaggctcatggaaaagtaagcaggctgcctagggcatagttgctttattgagtggatgaataaatacarctcatgcatattttagtaacagggcgagaaccccaactaatacctacatgcctgcgtggattaatcttttaaccaccatgtaatactttatatttaatatcttagaatagttaatatctattaactccttttattaaaggtaaaatgtatttatttataaactggttcacataggctataaaatattctttataaataatattgttcaaacttcacttattcataggaaacaatgaccattttatcactt

SEQ ID NO: 1409 - DNA, 501 bp, Bos sp.
gattaagacttaagagagaggcagaatttctgctttccttcattttaatgaagaaactttgttttatattttacataaatagcatgcaatctaacttaaataaatatttaaaacaatttaaaattgtgaatttaacccaaatggacatctctcttctttttaacatcaaatcttaaattattttttaatcttttattatgcttcatatttgaatgataagacacctgtaattttaatttcaggactatttrttggataccaagactaaattcttccattgagtgtttctcaattatgaaggcacagactaagtacttggaaacatggttaaaaatgaagattctcattccactaatttgggaagcttgagattctgtttctaatcagctctcaggtgatattgatgcttatagttcctgaaaaacaactttgagtagaaaggttttatttcaaaacaaatagtgactaagtaatgataatataaattttatctccagagag

SEQ ID NO: 1410 - DNA, 501 bp, Bos sp.; identical to SEQ ID NO: 845

SEQ ID NO: 1411 - DNA, 501 bp, Bos sp.
accctctttacacaaaaataagatgtgagaatcactttcatttcttcttagaagagtgatacctttgtttccctactctcccttcctcgaaaacaaaaatgaaagcaaaaaccacacaatttagagataagtcataaaaaataaaagtcatgtgttatttataaatcaatcatacagtaaaataattattttaaaaggtcacaaatacaacagttgcataaagtcagctttattttaagtgatcaaaaaawttttacctacttagtttttttgctgtcagagtgtactcagtgagttaaccaatgaattaaaattgctataagctgaaaaatactacgaagttgacaaatctctgacctcatcaacttacacatttacagtatcaggtgaacactgggtgcagaattcagttcaccacttcactaacaagcatgaaagatcttgatgatcagaattttcgtgctgtgtaaatttagcaggcaattttctgtgcactaaact

SEQ ID NO: 1412 - DNA, 501 bp, Bos sp.
cttcataatgaccttccaagtctgcacttcagtttataccaacatgcatatatgtacaggatatattttacagtaacatgaggatacatatatgtactccaagacaggagtacataatatgttattagcatattatatttctgtctttttaaaagttctaatggtataaaatttaccacatttggttcatatgaaatcatggttaatgtttcattaaatattttttatcttttatattctaaatgcatttstgttaaggtccctgtgattttatgtgtgaaaaaacatcaagtccaaggaatagtaaatcaattttatgattcaaagcagtacattgataaaatagcagaggaattaaaagctctttctaaaacaagttggattaagtccctggtgagggaactatctcacatgctgaaaaacgcatgctgcaatgaagatcaaagatcccatgtgctacagctaagacctctgtcagttcagttgctcagtcgtgtccaa

SEQ ID NO: 1413 - DNA, 501 bp, Bos sp.
tcataagacatctacctattcattggcaagaaaactatataaccactacttctatggctacaactccccacaaagcacaattctgctcccaaaccctctgaagttctggatataaatgtaaaatataaatataaaatgttcattgaaagttaaaattcaaagcatctgaactgtactcaataaagacttcaaatatatattgaaatgttgaatatatacatcagtattttatttgcctagattttattcartacaacattatgcaaaacttctgaaagatcaagacattagcctgaacattgggccctcctagacaaactgggcttatctttccatctcctaatttagttatatctgcaaaatcccttttactaggtaagataatatatccacaggtttcagggattaggatgtggccatctttggcagctggggggaattatactgtatatttcacatctctacaggacacaagtctacaagttaacctcttcctctaaa

SEQ ID NO: 1414 - DNA, 501 bp, Bos sp.; identical to SEQ ID NO: 4

SEQ ID NO: 1415 - DNA, 501 bp, Bos sp.
aaatattctttataaataatattgttcaaacttcacttattcataggaaacaatgaccattttatcacttttaaaacttttattataaaagaaatccatgcatatggtaaaaaccttaatactttaaatggtacaataatgaaaaacatgtctccctgaaaagtcaacttcaattccactccccaaagaacactaccgtgaactgtttgtgtgtgtgaatctttccagaaatgatgaaaccattggcaaargataaataaagatggtatgtgattattttcacttgctttccattaattaggagaaattttggtaatctttctctcatgcatgtttgctggctatttgtgtgtatacatgagtacatatttctataaatagcttttttatgtcctttccagaatcatattgggcaatggttattttttcttacctattggtaagagttctttatacatttcagggattagctattttcctgtgtgttgcatatcaaattct

SEQ ID NO: 1416 - DNA, 501 bp, Bos sp.
tgtttcttggataatctttctgtctcttcagctgtattttaaaatttgttccaaatttgacataaaagaattagatcaggcttattacttggattactgaaagccactgtctcagaaactgcatacatgtgatttgtggtctgaattcagcctgtagcctgttttgcttagataacagagaatttgaattgctatttaaaaatcaggagaattcacataaacatggatttctgtttttattcatataaaarcttggatttctgttctccattaaaataaaagccttgcttgttcagattgttaactctgattcagcctcacaggtggttttcttgcttccctacattctctacagtcatcagtcctgtgactttaaaaattcatatttgatcgtatcttaccttaaaattcttgagtagttccttgaggtctagctaacagtctaatttttttaaactgtggtcacgatttgaccttcgcctgtcccttcagccttgtcct

SEQ ID NO: 1417 - DNA, 501 bp, Bos sp.
tcaactccatgtacagtaaaagagcttgcaggaaattgaatgtcacaaagtcagagtattttattgctgtgcacatagctaacctgaaagtttctgcaaccttgtgttaatatttaagtggattttagataatattgttgtctcatagtttgatcaagttatcatttgtcatgatcaaattgaattatgaatatttcaagtctttttctcataacaacttcagaaatgttcattttagtatttttgtgttrggttatttttcactggacttctgtggtggctcagaggtaaagaacctgcctttcaatgcaggaggtgcaagtttaatccctgagttgggaagatcccctgaaggaggaaatggtaacccactccagtattcttgcctggaaaatcccatggacagaggagcctggcaggctacagcccctggagtagcaaagagtcagacataacttatcagctgagttcacaggcattttgtactagctaatattttag

SEQ ID NO: 1418 - DNA, 501 bp, Bos sp.
aacctattcatgccaagtggatggcatgaccttatactcagaatagcaaagaatgtaaatctaaaaataaaatatcttaaagacagaaaattaaaatcgtgacagttaaagagtaagaatgtacattagaagtcacatttctatttgtgtgtttgtttaaggctgttgctcaaaaaaaaaaattctgaaaaattaatacaattattctatgcagcttaaattatacctggtctatggctttacttagcagraatcacatcaaaatattttattttatttcttaatcatccccatcagtttagtcatgattctggggtaaaaggaaaaccagtaagtaaagcagaaagaaattaagaggagatgcaagactagcaatgtgatacaaagtgcagggcatgatctgaggtcttttacagacacttttattcacacattaaaaaattactgatggattttttactgaacatgtttatgtttgtgtaataagggtcccagaattat

SEQ ID NO: 1419 - DNA, 501 bp, Bos sp.
attgctaaatacttctgtcaagcccctcgaggcattttcagaatttagttcttggatttgttgcgataattttcaggctctcctttttggtggggatgaggtgagcaacagcttgaaactatgattcatttctgtttgagtttctgtcagatacttgcaggaaaaagaaaatgactaatcacctactaaaaatggcaacagatgccataagcaaaatttcattcaacctgttaactttggttccactgtamgaatcatttaattaaaagtcttagtttttaaatatgattttttaaaaatagcatctgcttctagaatatgaggaaatgaattttatgctcaatattttgacaaagttcttcataatgaccttccaagtctgcacttcagtttataccaacatgcatatatgtacaggatatattttacagtaacatgaggatacatatatgtactccaagacaggagtacataatatgttattagcatattatatttctg

SEQ ID NO: 1420 - DNA, 501 bp, Bos sp.
tttccatactgtgcactttggaaggaagttggatgtaaccacttttgagagcagctagaatttctccagaattccagttttattttaattttattgtggcattactctgtactgtgtcatacataggtatgcatgaatgcaaaacatgtgttcatacacaaatgaacctttgtgtatgaccttttctctataccagaagttcatcagggactacagattgaaagcatatgtttgaaagggaaatttttttwaaatgtaggtacattccaaaatgaaattcagaaatgaaacaagctgctagttcttgatttgatagactttagataaaatattcatatataaaatatggatccagcattcttttttgttaaggaataaaataccttcaacagctctgcttcagcctctgtaaagattagcagttgctttttttatggaaacccaagagatttgatctgttggcctctatttgcatttggaagctgggttcagctcccagtg

SEQ ID NO: 1421 - DNA, 501 bp, Bos sp.
cactttgtatcatttctcttctgcagttcagaaactcagtctaaaatatttcactaaattagaaacccactcgtctcttttgagtttgtacttctgaactgacactgaactctggcactttagatcacactacaattagaacaatgtaactttttgttttggaaaagaatggctttaaaagtctgatcaatgggtcctgcctgttttggaaatcaagtagcacttgtaaacttcagttcctaaatgttacstaattgtgaataaacagatgtgaaggaagcagaaataatacataatatacatcttagatcatatacattcagaaataataaaaatgtgtttgtccctttaaaattctatattgggaattgcatcaagaattgcaaacaaaggatattaaaagatacagacagattgtggttcaggggtaatatatttattaattttaaagaagtaaattagaatgtcaagtaaagctggtgaggtctccaaagtactaca

SEQ ID NO: 1422 - DNA, 501 bp, Bos sp.
agcaatccatcagtgataggcagtcagagaagaaaaaaacacagtagacattaagttggagaaagatgaagggcatgtgaccatggaaaagagaaactgaaggggtatgagaagatgaagtgaatcctttgagtttcatgaaaaagaccaatactattgaattctgactcattggacatgctaaagaagttaaactctttcttacaaaagattcatgcagagccatttgtagagtaaatactcttaaaccrtttgtatgtagacaaacatctaactgtattttgtgacacaaagtaataagaagtaaacattcatttaaaatactattaacttgattatggtaatagattcagtgtaagcccagaaaattatgggctgataatattagcttgttcaatttaaaaataacgtgttgactattaatagcaatttagtcttagcaataaccagatcatgacagaggaatggtaaatacacgtgaagtaatccaaaagaattcaa

SEQ ID NO: 1423 - DNA, 501 bp, Bos sp.
tgaaaaaaattatttttagtgtgcataacagtataacttaatatctactgggaagaatagatacatagttgaatcttccttgtgggttacatcatgtatggtttctggatatgaatgtgatcaccagaactttttctacattagatgaatacacttaaggacttgcttaggtaccttacatatatgagtattgatagatactaaatgctttttgtttgaatcaggataaatagaactgaatttgttttagrttgtctaatttctctaccattacaggggggctaaacacattcaaatcacttgttttacaacttggacatacatgcataggcagatctatctatgtatttcatttgaactacaggaaatgcttctataacaggggtctccaaccacaaagccatggactggtatttgtccatggcctgttaggaacctggccgcacagcaggaggtgaatggtgagccactaaacttcatctgtatttatagctgcttccc

SEQ ID NO: 1424 - DNA, 501 bp, Bos sp.
gtccaactctttgcaaccccatggactgtagcccgccaggctcttctgtccataggaatctccaggaaaggacactggagtgggttgccatgtccttctccaggggatcttcagacccagggactgaaccccggtctcctgcactgcaggtggatcctttactctctgagccgccataggttgaagttacttccctaaaactgactggaccttgaggaatctttatacagatattttaaattactgtttcmagttctatgatggttgtttcttgagttgatttgtaattcatattttctgacatatcttattcattttcatttttaagtaaagtatgattagtcatatcctctttttaaccttttaatctctggcaacagtgttcttcttatgcttcatctttcttcctcttcgtgcttcagtctggatattctctactgagttacattccagttcactaatcccttctttgatgaaggattggctgttaagctcatttat

SEQ ID NO: 1425 - DNA, 501 bp, Bos sp.
cctactaaaaatggcaacagatgccataagcaaaatttcattcaacctgttaactttggttccactgtacgaatcatttaattaaaagtcttagtttttaaatatgattttttaaaaatagcatctgcttctagaatatgaggaaatgaattttatgctcaatattttgacaaagttcttcataatgaccttccaagtctgcacttcagtttataccaacatgcatatatgtacaggatatattttacagyaacatgaggatacatatatgtactccaagacaggagtacataatatgttattagcatattatatttctgtctttttaaaagttctaatggtataaaatttaccacatttggttcatatgaaatcatggttaatgtttcattaaatattttttatcttttatattctaaatgcatttgtgttaaggtccctgtgattttatgtgtgaaaaaacatcaagtccaaggaatagtaaatcaattttatgattca

SEQ ID NO: 1426 - DNA, 501 bp, Bos sp.
tctcctgacctaatcacctcacaaaggccccaccttctaatatcatcatatgggggattaaaatgacaacatatgaattttggggaggacacaaatattgagttcagaacataagcatactaattattgttataagtataatccaactatgggacttgtaatgttctttttcagttcaagtctcaaataccaaaaactttgtgagtgacctttaggtgtgtgtcttcgagtatgtgtacacacttaagcayattaagtaataacattaaaaaatatccaccatatgctacatgggtgccactgtttacagcaaagttgaaggggagaaaataatatttatttaggaacagacatactacaaggcccaggttttacaagcatgtgaatgtgtagataatgatatagtagactgagataaaagatatcacagtagtccgtttgttttccaagaacttcagggaccaagcaatatttagaactagtttttatttaaccttaatg

SEQ ID NO: 1427 - DNA, 501 bp, Bos sp.; identical to SEQ ID NO: 462

SEQ ID NO: 1428 - DNA, 501 bp, Bos sp.
catgggacccctcatgtgccttagtgaaggtaaatttcacctccagacctgggaggtggttggtcagagaatgacccatattcatggccctaaatcagttcagaaattggcatgagacccaaatcggattagtgagcaagctgagaagtttgctgggccctccagaaaaaaaccttaattttcttttttcatttcttttgttaaaaaatatatttatttattttcatctggatacatctcttttaaaattktattttattgtagttgatttacaatgttgtgttagtttcaggtgtataacaagcacagtgattcagttatacatatagatatatctattctttttcagattcttttcccatataagttatcggaaaatattgagtatagtttcctgtgctgtacagtaggtccttgttggttatcttttttatatgtagtaaggtctgtctgttaatcccaaatttctaatttaccactgtcccaccctttccctgttgg

SEQ ID NO: 1429 - DNA, 501 bp, Bos sp.
gttctctcagaacctcttattctgaaatactgagccatctgaatttaccatcttttaactattttaaattcactatatatgaaatggtattatatgtatacatgtatgtatgtatgcacacatatgcatatagattctggtttaataacatcattaaaagtttaaatggcaagtcaagttattaattgcttaatcaaacagatcaatttttaatgaatattattaaaatatcagttttatggttgaaagtrttggttacacttacatatttatattagagtaatgtaaaaaattaatcaatggaaacctcagctagagttgaaactggaaacaggacctctcacaccctctgacaattgcacagcccaacaggaagaaagactacactcttctcctgaaaaggattcaaccaatgaaagccatggctccttatttgcttagagccctccccaacttattttcctctctgtaaaacattctcctctcattcttgtgactgga

SEQ ID NO: 1430 - DNA, 501 bp, Bos sp.
acaaattcacaattatacttggccacttatcttcaatggtgtatttgcaacatttcatatctctgatctttgaccaacttgaattaaataacttctaattggagatgaatagtttctggtttggattacttaatatttattttctttgttttaatattaagaagtgtatcagaactatgtttcttattactagtagcaacatttttatagaactgtaatggaaacattataaaatatatatatccaatatytaataatatgaacgctttggggataaataaagtgatgatgctaaaattaaattgttgtctggcaggcagctataaaaataatgacttgaaatactgagtcattagctgatgcactaaaatctaaatctggtgtgtaaaagccacttgtggagtcaacatataattttttagagtgctcatattttgaaattaacattgccatatttggggaatggctgcaagtttaggaaacccacttcttgtactctta

SEQ ID NO: 1431 - DNA, 501 bp, Bos sp.
gtttccactaaccagtatgtcttggaactagcgcatatgcttggcatttatgtcagggccaaggcctgcacgagcttctagagacagccctcttcctctttctgccctttgcctcgctggcctgcactcactttctccacaggggcagtcctgctctgagctcccgcctgtgtgccctgggtcctgctgccttttaatcagtctccctttgcaggagttgcttctgttcttttgatcactaaggtaaaatwttttttgtttattcacttgaatttataataaatgaatttttcctttcccttttgacagctagctttcttagtctattgctttcattttgttatttagaaaataagatttgatactttctctttcaatacagtataatagatactgttagaaaatcaggaagatgatgacagcagtttttctcttctcaaggttgttctcacctattcagaagaagtaaagctgtgtgcagtcagtttctgatggaatata

SEQ ID NO: 1432 - DNA, 501 bp, Bos sp.
aactagcgcatatgcttggcatttatgtcagggccaaggcctgcacgagcttctagagacagccctcttcctctttctgccctttgcctcgctggcctgcactcactttctccacaggggcagtcctgctctgagctcccgcctgtgtgccctgggtcctgctgccttttaatcagtctccctttgcaggagttgcttctgttcttttgatcactaaggtaaaattttttttgtttattcacttgaatttrtaataaatgaatttttcctttcccttttgacagctagctttcttagtctattgctttcattttgttatttagaaaataagatttgatactttctctttcaatacagtataatagatactgttagaaaatcaggaagatgatgacagcagtttttctcttctcaaggttgttctcacctattcagaagaagtaaagctgtgtgcagtcagtttctgatggaatatagcaagaggtacaaataactagaatc

SEQ ID NO: 1433 - DNA, 501 bp, Bos sp.
tttccctgtctctgtctgtctgtctctctcacacacataaatatacatgcatcttttaaatttcaggctcccagacatttattttatcttataattctaagccattttgtttccttcagttatgaatatttttatgacataattagttcagagattttatcttatctagtatgttctctcagaacctcttattctgaaatactgagccatctgaatttaccatcttttaactattttaaattcactatatrtgaaatggtattatatgtatacatgtatgtatgtatgcacacatatgcatatagattctggtttaataacatcattaaaagtttaaatggcaagtcaagttattaattgcttaatcaaacagatcaatttttaatgaatattattaaaatatcagttttatggttgaaagtattggttacacttacatatttatattagagtaatgtaaaaaattaatcaatggaaacctcagctagagttgaaactgga

SEQ ID NO: 1434 - DNA, 501 bp, Bos sp.
tctcactcttttccatgtctcttgaccctctctctctctcatatcttttagctctttgtgttgctcaactacatttttgctgttctctgaaactattttccagtttacaaattctctcttcagggtctgatctgctcattaatcaattcacttgggcttttagtttcagttcttaaaatttttttcagttctcagtctccttgattctgtttcagacctgcttgtttcttgttcatatgtataacattttsatattatttgtttaataaaaccgaatatttatgtttttatttaataatattaaatttatttatttaatactatttaataaaacataatattttaaaatttctttaaatgtgttaaacctagttttctgtctgctaactccagaatacaaagtctttataggtctgtccctattgtgggtttttcttgttgaccagccttttggtaccttatttcttgtgcattttattttattttgtctttattgagaca

SEQ ID NO: 1435 - DNA, 501 bp, Bos sp.
tatcagtggttggggcatagaattggactactatgatgttgaatgatttgccttggaaatgaactgagatccttctgtcatttttgagattgcacccaagtactgcatgttggactcttttgttgacttttttttttaatcattgtgtagttagacaaaaaattgtctctatgagaattttgctgttatcaagtaaataatacagctaaactaataatttataagaaattaataataatgtaaaccttatrtgcaattatattttcttaaagtattcagttgatttttagagattgataactaattctggagacttttaaagagtagagcagtgtttctcaaactttagtgtgcagaagattaccctggaaaaatgtaaacagattccttggcctcacttctagagatgctgctgctgctgatttctagacctgtactttgagtacctctgatatagaaaacttggaaaaatcctgaagattaatgtgcctaacctatgat

SEQ ID NO: 1436 - DNA, 501 bp, Bos sp.
tcaaaataaaaatgttggaaggaaataagtaattgaaacataacatgttatacacataaatggacaagtttagtcttgttgctttaaaattttactactataaaaaaccttgaagcaattttttcttataaatggaagtgatagaaatatataaataattgaaacataaaacaagatttagatcaaacattattgccatgaacttaatctaattcacttctgccatattgcattatagagtagttttttamacaataattaaatttcacaaaaaattttaaaggtaaaggttcataaaagtttcagctagctttactgatatagaaagtaaggcccctagaagataattgcttaatataattaatttattcattaaaatgtcttgtttacttgtattataaagatgtttacaaagtattctgcaatgtttgaggatacttaatttagaactgttatttatgctccatatactccattcatcctttggttgggaactatttt

SEQ ID NO: 1437 - DNA, 501 bp, Bos sp.
atatttttatgacataattagttcagagattttatcttatctagtatgttctctcagaacctcttattctgaaatactgagccatctgaatttaccatcttttaactattttaaattcactatatatgaaatggtattatatgtatacatgtatgtatgtatgcacacatatgcatatagattctggtttaataacatcattaaaagtttaaatggcaagtcaagttattaattgcttaatcaaacagatmaatttttaatgaatattattaaaatatcagttttatggttgaaagtattggttacacttacatatttatattagagtaatgtaaaaaattaatcaatggaaacctcagctagagttgaaactggaaacaggacctctcacaccctctgacaattgcacagcccaacaggaagaaagactacactcttctcctgaaaaggattcaaccaatgaaagccatggctccttatttgcttagagccctccccaac

SEQ ID NO: 1438 - DNA, 501 bp, Bos sp.
taaaaactttatctgtaggaagaatacatgcatttgtgtacgcattgcaaatatctcagttcagggctttcctttcctttttctttgtgttatctttcaatgcacagaagttaatttgggaaaacttatcacattttgtcttgtgctttttgtatcttatttaaaaaagaattttccttatcctaggttcttagttgtcctggaatttatctcactcatgtaaaataaaatttttattttatttagatttratattttccaatatgaattttctcttctttgatttctggatgtcaccatggattttttaaaaattggatttctattttgttccattagtcatgtaaggcaagttactcccatatggttctttttcaaattgaacagactatgtatcaagtcatgtattataatatgcagattttgtgtcagtttcttaacttacacaagcaattgtattagtattttgatcgaaactgtaatatattgataatacataga

SEQ ID NO: 1439 - DNA, 501 bp, Bos sp.
cacatctttgggagtatacctctaggataaattcccagaaatgggattgctgagttaaagattagaggcagttatagtttgcttcactccctattgccttccaaaatgttgtattgatatgtattcttacaagcaggaaatgagcatctggttcctcataccatagccaatagtgagtattgtaaaaacttttcagttcttacaaagtataatctaagtactaaaaatatgtttttattttacattttccrttatatttttatttaaaaaatacaaactcctcctcattcctccacccccaacatacttgaaatagtcactcttcagcatggcggaaatggatccagctgtagactgaaggttaagaggggaggcaggcagtgagaacagatcatcctttagagagccttgagaagagaagagagaaggagcaggcaggaagtggggtcaaggctcaaggcaggaaaagcattttgtttgttcaagaatttgagttattta

SEQ ID NO: 1440 - DNA, 501 bp, Bos sp.; identical to SEQ ID NO: 333

SEQ ID NO: 1441 - DNA, 101 bp, Bos sp.; identical to SEQ ID NO: 518

SEQ ID NO: 1442 - DNA, 101 bp, Bos sp.
tgacagttaaacacatcttttaaagcatagacacacatagaaaaaacatayggtataatgatttccttgaagactacaatgttagatttggaggcagcttc

SEQ ID NO: 1443 - DNA, 101 bp, Bos sp.
ctttaagacatggcttactttacctcactatcaatggagggagaaaggaaygcacatgggatctttgaccatcactttacccgctgctatggtttcagaga

SEQ ID NO: 1444 - DNA, 101 bp, Bos sp.
cctctcttgtgtcgttattatgtctttctttgtgaattccttttgacgaaraaacaattgcatgtatttgtaaacacaccataaattctacaaggggaaaa

SEQ ID NO: 1445 - DNA, 83 bp, Bos sp.
caaggaagctgagtccactcaactagaagagargcgaagacaaggtcatcatggcttcagtgtccacacatgaaaaccaagaa

SEQ ID NO: 1446 - DNA, 101 bp, Bos sp.
gattagtttaacgagacttaactgttcccacctaagactgtcagagggagyacagatttgatacccttttggatagacttaaaacttgagtcatctttatc

SEQ ID NO: 1447 - DNA, 101 bp, Bos sp.
acttgatcaacttaattccttttctttatcttccctccctcactccccttkcctgccccttcttttccaagctgttttgctttgcaatatgttactggtaa

SEQ ID NO: 1448 - DNA, 81 bp, Bos sp.; identical to SEQ ID NO: 589

SEQ ID NO: 1449 - DNA, 101 bp, Bos sp.
tgactgccttctctgcaggttgaagcccagagctttaattattcgtatgcrgctatgatagatagcattttacttgaataatatttatgctgtggtttttt

SEQ ID NO: 1450 - DNA, 101 bp, Bos sp.
tataatcctcgaatccaggagatccaagttgtcaaattagagaaacggctygacgatagtttgctgtacttgcgagatgcccttcctgaatacagcacttt

SEQ ID NO: 1451 - DNA, 101 bp, Bos sp.
cagctccggctctcagcctgtctgcatcgcccccctcctcccggatcctgycctgagccagcagctcctgccctgagattccgtaggcagaccctcaagcc

SEQ ID NO: 1452 - DNA, 501 bp, Bos sp.
gtcactgaacctaatcagacgtttgcattattactattctttttttttaataatggtggtggtggtggtttagtcactaagtcgtgtccgactcttgtgattccatggactgtagcctgtcaggctcctctgtccatgggattctccgggcaagaatactggagtgggttgataagagagttgaagtgggtccccttcagagttttctttcttttccattattctctggtaatggactgaatagggcaggygtagccagaaatggggacattgagaggtgtcaggaatactggtgcgtttgtcatctaggtctcagggctgacggataaaagatcatttctgtatcggaagataaagtcacacaactgtctaaggcaaatctacattgatatgtaaatacgtttgatggtggtaccttctttagtcgcttgattatatgactcttcactggcccaatgcaggcataatgcagttggtgatttttaacgtatgcaaatgttc

SEQ ID NO: 1453 - DNA, 501 bp, Bos sp.
aaatcatttcatatttctgttaccagcttttcttagtttcaacaaacctactagatctaatgtgaattactgtctatgaaagtttattacaaaacctttgtggaaaaatgggactaacttatagtaattaggatactgttccaagaaattggatacatattactgtgtaccaaatattatagtcagtgctgatgtcaggatcactagtgaattaagagtcaaatggagaaacagacatggaaacgggaatrcagactatgatgtaacaaagaacatctggataaagctgaaagaaggtcatacaagattaacagtggtgccaggtctgacgcattggaggcaagtgacaaatatctaataggtgaatgaatgaacaactcataaaatgattttttgaaatttcttttaaaaatgagtttgattttaatttactaatcaattaaagatagaatttatgggaaaatggaaaactctggcagggtcacagtttgtagactgata

SEQ ID NO: 1454 - DNA, 501 bp, Bos sp.
cctaccacattgctcccagcagcggtttctctctggctgagggatttttattccaatttgggaagagattccctgaaacgaaaaaagggctgcttagcctttatctcttggtatcatgccagacatgtgtttggaaaattagaccagtgcattactgatcccttttcattcaaaattaattacatcatataggatttgaagagtggcagccagcccctccagaagtttctaggaactttaaacttaaagtrgaagctttaaagtggaggctttaaacttaaacggttatgcacaggtcaggtccatggagtcaaatgactcctaacaacatcatgacctcatgagacttaatagacagaggccatttccttctagtgtggtgatcttaataaccgtaccaatatcttggctatatgtctgtaacttcgagttggttccttatgagtttgccacacaaaataagctctgtgcttgcaagaagagacttttgggaagactttt

SEQ ID NO: 1455 - DNA, 501 bp, Bos sp.; identical to SEQ ID NO: 350

SEQ ID NO: 1456 - DNA, 501 bp, Bos sp.
ggtgaaaaaagacatggataataatagctagcagatggaggaaaatccactgcacccactctctgggacacacacccacaaacacacacacgtcaaacaaaaaataaaacaaaaaaaatccctcctccacgagtgaaaaaaaaaaccccaacaatgctagaccctgagtagacactcagaaatactttttcatgatccccaagcctggtcctccattgtaaagttagaatttaacaagcaagcaatcttastagaaaacttgacacctggagcatgggtaaatctacacagaacactccagactataaggtgatcaagtaagaacagtactcggttttaaaagtgcaccattagctcatgaaaggaagcaacccagcagttctctgtaggacactgaggaagacagggagaagggaaagtttatgagaaaagacacagctgtgaggaagcagtcagatccctagccagctacacatacatgggtaagtataggaggggctt

SEQ ID NO: 1457 - DNA, 501 bp, Bos sp.
ccagccacccagccagccagcagctctcccgtggggtcgaggctctccggggaagccagtgtgacagcacattcctctctgtctagggtgagttccctttgttcaaattggattggtcactggtcagaaatcctctctaatagaacttggtggtctgggcaggggcaggcatgactgaacatatgaccgcacatgtcccatgtactaggctgtagcacataacatcatcccactccatcatcacgcactcygatatctttatatgatccagaggaatgttggaattggtttcaagtcaggattaggtttattatagggcttcccaggtggtgctagtggtaaagaacgtgcctgacactgcaggagctacaagggacaggggttcaaaccctgggttgggaagatcccctggaggaagacgtggcaacccactccagtattcttgcctggagaattccatgcaaagaggagcctggtggacgcaaaaagtcagacatgact

SEQ ID NO: 1458 - DNA, 501 bp, Bos sp.; identical to SEQ ID NO: 77

SEQ ID NO: 1459 - DNA, 501 bp, Bos sp.
acagacatcagacacagttgagcataagattgaatcaccaacaaggaggagagtgaaactgagtattaaaggatgagcctacactcttcacttgcctggctcccaaagccctgacacccaggctaaaatcactcttttctgtaccatccttaccctggtcaagggattggagggtttctttctggggaaatgttccaatccaagagtaaatttccatagagactgggacttggaaaccctgaacccaaagkttgagtttacacccagtcaacaaatctgctcactcacccatccagaccttcctgggggtgcacactgcctcattttgaaaatgaacagagccagacacataaaatattttttaaagcctccaacaagaaagacaaagattaaaggagatggaaaaaagaaactcagaaaaaataagaccattaagagagaaagggaaaactgaaaaacaaaaaaatatatgctggaaataatggccgaaaaaagtgagaa

SEQ ID NO: 1460 - DNA, 501 bp, Bos sp.
ccctgtatttgcaatcaattcatgaatttttatgttttttgaatcttttcaaatatttttggttttatattattttaaactatattgttttcttatttatatattcatatttgttttcttcagaacaaatgttactgtatcgtcaatcctgtgttacactgaaaattgctaaaggaataaaaataaaagcaaatatgaagcaaaattattgttcaattgataattatgaaacagtgaacattatttcatgwagatgactttattactttaattatggatactttattttaaaagacttttataaattgtttaatcttacatgatttttatcacagtaattgtgtttaagtgcttccctggtggctcagtggtaaagaatccttctgccaattgcagaagaagcctggagaatcccatggacagaggagcttggagggctacagtctatgggatcataaaagagatggataccactcagtgacagagtaattgtgtccataa

SEQ ID NO: 1461 - DNA, 502 bp, Bos sp.
gaataagtcagtcagttcttctgaccatggagtaatatatactgtgtagatgtggcatgaaattaaaaatctatatggttgataattcagaaaacaggatttttagatatgtcatatcattgggaagttttacgatcttatgaatttaagaaatagaaatgaataataaataaccaaaaatgggcataaactttaagactgtatggtaagatatgagaatttgatgacttttaacagtgtgttgtttccatcgtagcagaacttaactgcttctaagtaactgaagccaaggggcttccccagtggctcagcagtgaagaatcagctgccagtgcaggggacacggtttccatccctgggtcaggaagatccttggagaagtaaacggcaatactccagtattcctgcttgggaaattccatggacagaggagcctggtgggctacagtccatggggctgcaaagagctggacatgacctagagactaaacaaaaacaaaat

SEQ ID NO: 1462 - DNA, 501 bp, Bos sp.
  misc_feature (1)..(54): nucleotides uncertain from position 1 to 54
nnnnnnnnnnnnnnnnnnnnnnnnnnnnnnnnnnnnnnnnnnnnnnnnnnnnnnaagggacaagagcggaaaaggcatggtggcatggaaagggtttcacaaagcaatttatcctttaattcttcttttgctctggagagtcctgctatgataaacacgtcccattaatagacattagtggtccatttaagaaacagcagatatattactcatgttgcttcaaagagtcaacaggaagaaggaagcccatytctgtgggaagcatttctgagtccatcagcagcctggtgacctgtcgtaattgatgggttattcctcattattcagttctcagaatgtgacctggggaaaaactccactgaggtggcacttaaaaagaataaactgtcaaatgctggtccacttggtattgaaaagggtaaaggctcaaactcaagtcaaccaaaccgaagtgacaccagctcgaacatggtacatggtagagaaagctgctcctgctcc

SEQ ID NO: 1463 - DNA, 501 bp, Bos sp.
aagaagtggtagctgttattatcattgaataatttgtatttctgtcacttgaatcatattaaacctgaatcagttatatcccatgagcccctgaaatatcagtttcctctgttgatacaaagtgctgtgtttaaaataggaaatctttgtattcccataggagatataatagatcaatgctagttttattctttatactgatagtacatgaccagaataggaaagttcttttttagtaggtagaagctccwgcttaaggcaatttggggaattgtatatacccaaagtacttgtctgtcttcgataattttacagggataatttagtgcctaagccatttttgagatactgaacattctttccacataagaatttgtctataatgcaaatgaaattatcataatcaggagatgtaatttattaagtgccaattttatactggttgttttactagaaactgttggtggatagaaagatatgtaatacatgacattcatcttt

SEQ ID NO: 1464 - DNA, 501 bp, Bos sp.
gtccttccaatgaccacccaggactgatttcctttaggatggattggttggatcttctcgcagtccaagggactctcaagagtcttctattcaaccataaatgaagtacaatatgtaggatcctagaaaggattaagctaattggaagaaactaatttttcttggaggccttttggaaaataaactaaaaagtttatggttaatctaggggaagggcagtttgaaagtcagaaatcaattttaaaccaacrtagagtctacatcttttcagtttatctcacttcgtatgcctcttagctgttggtgttaataaatgaagattcccattaaataaatgtgatgccaggaaaccttttcacaggttctacaaccatcactggttggcactttaacttttgggggttcagttcagttcagttgctcagttgtgtccgactctgcaaccccatgaaccacagcacgccaggcttccctgtccatcaccaactgctggagtctatc

SEQ ID NO: 1465 - DNA, 501 bp, Bos sp.
tcacgcctgactgaggtgtccacagggcgtggaatagaggcaggggtgtgtgggctcagactagcttgcaggagccaatggtgcactcctcttttaattctgtgttcagcaatgacctccaggtcacttaaaattactcatggggtgagtgttcgcaccacagaaatctgcaaaaactatagctcagagttacttttaccccagagagtcagtttagcattgagcacgggttacaagtaatctccaagtayatgcagtggctcctactacttgccttcgcatctgcctctgagggtgacgtagcacccacaaccacaaggacccgggagaatcctgtggccactgccctgatgtcgcaatgatgatcccgggactgtggggtagtagctgtgtctgagttccctggagctattatggaaagaaaatgacaagctctctaaacattcagttaagtcccagtggaaaagccagagggattccatggagccctaaaataatcct

SEQ ID NO: 1466 - DNA, 501 bp, Bos sp.
tctatgtaaataatcttaaataactttttaaaaattaaagtataattgatgtataatttaacaaatcttttttattttttaaaaatctgaaattttgcaaaaatgcagagatttttccaacctaaactctagatatattttggtatttaagtgaatgtttgctgttgccctatcctcagaggagcattttgaagtgttctcccaaaagttaagtgaagttcagttcattttcaggtctaggctttttaatwagaacttggaattcctatacagtgttagtgtgtaactaagaatgcaaaatggtgcacctgctatgaaagacaatatggagcttcctcaaaaaattagaaataaactaccatatgacccagaagcccatcttctgcgtatttatccaaaagaattgaaatcaggatcttgaagcggtattagcacttatcctattcataagcattgtgcatgcatgaaagtcattatagctttattcctgagcatcaccat

SEQ ID NO: 1467 - DNA, 501 bp, Bos sp.; identical to SEQ ID NO: 894

SEQ ID NO: 1468 - DNA, 501 bp, Bos sp.
cccactgccatctggctgctaccacctcagagaccatgagaaacactagccattgtcttccaaattcctgaccaacaaatctgaagagagagagagttttttaaactcctacatttgggggcaaattcttatacaccagtaataatcacagccaataagtcacttaaagactctgaggctctgagagattatcaaagccaaaaacactcaggatcattgtgagacactggtgacacctgagatggtacctrgatggtgcttgcaatgtgtctgtacatccctgactctcataagcattccttctctccttctctctaccatctttcaattaggggagatggtctaagtaaaagcgatttttcaagctgtagatatttaaccaatgttagttatttttcctttggaacccattgtccccagtagtgtattctgagaatacaatagtgtattcccagtcaatcagtagtctgaggtacattcataatccgcttgttattggat

SEQ ID NO: 1469 - DNA, 501 bp, Bos sp.
ctgcagtttggttgaatacaatgtgtggtgcagtggcaaagaatccacctgccaatgcagctgatgtgagagacacaggttcaattcctgggatgggaagataccctgaagaaagaaatggcaacccattctagtattcttgcctggaaaattccatggacagaggagcctggtgggctacagtccatggggttacaaagagttggacaggactgggcatccatgcattatactaagaaccacaatatctyaggatttagggctgtgatatctaaaggccatgtcataggtatggggataactgggcgtgtatcttaaagaattagccgaaatgatctaggaggagtttgagtgatagaagaacatttctggaagagggaacatgaggaaatgtagaaaggataaaaatagcctggtatctatggaaaaccaaatagttcagtatttctggtgcatgaaagaaaaagggtaaaatcactcaggtttactgagtaatgattg

SEQ ID NO: 1470 - DNA, 501 bp, Bos sp.
  misc_feature (73)..(122): nucleotides uncertain rfom position 73 to 122
aaggtctatgaggccacttccatcttcttaaggaagactcctctccaaaatgtttcagctaggagtatttcannnnnnnnnnnnnnnnnnnnnnnnnnnnnnnnnnnnnnnnnnnnnnnnnnttgacacctactcactaagtacataaaatcaccttccttgagtcaagcgatagaaatgtcatagtcataatccccattttataaaacaatcacatatacatacaataaaacatttttaagtgccatgtytaacaatagctacaaaggcatcataagcctaattcataaagatcactggcagatctggtttctttacaattataatccaggtaaggaaaaaaaattttttaatcatagtaaagtttcattattctcaaactaaatacatgctccagatcactggtttggttagctcctcagtgggaggagagcaaaaacgagacatgaagtgccagaataaaatcttccgcttcaatttctcctttatttaaaacttttt

SEQ ID NO: 1471 - DNA, 501 bp, Bos sp.
gctacagtgcagaagttcagtttagaatcagaagaagtgtagaatcctgtctgaatgtacttgttttgtggtcttagacaatcgtgaatagctaatttattgagtgcttacatgtgtcaggcatagcactgagtgctttttcagtggcatatataacccctcagtgacccttatcaggcacatattattaaaatcatcatttacagatgatgattacagtcataagagagggtgttacttcctatcaaggyttaattttaagagtcaactcaggtataaagccttctgacacaagaaccttgcaactagtcatacattgacactactgcctcatctctttgtgcttcagtgtcctcatttgtgagatgcttataatatctggagcttccctggtggctcagacggtaaagaatctgcctgcaatgcaagggacctgggtttgatccctgaatctggaagattgcctaggaaagggaacggctacccactccagtattcttg

SEQ ID NO: 1472 - DNA, 501 bp, Bos sp.
gaccagaaggaaagagatagcccatgcctgaaaccctccatagccagggttccaacctgctccctccacccccacacaggttcgttgtccctgctcttgctggcacaaaccatgcccactcccacttctggagctctgcccatccttccaccttccctcacccctttaagggtgtcctcttctatcttgtctacttaaaccagtaatgcaccaagtataagccatagatcaagccgcacaagtcttccccrgtagcttgatcgaaatgcagattctcagcaccaccacctgaaggcactgggcctctgtgggaggggaccgagagatcggagggatttggatgttttctccaaagcgtgagacccaccgagctagagcaaccttacagcaagggtgtggagttttatcagtgggttcctgtttctctctctctctgtcattggacaggttatttaatctctctaggctccaatttttcatctacaaaatgaggataatata

SEQ ID NO: 1473 - DNA, 501 bp, Bos sp.
tcataggtatggggataactgggcgtgtatcttaaagaattagccgaaatgatctaggaggagtttgagtgatagaagaacatttctggaagagggaacatgaggaaatgtagaaaggataaaaatagcctggtatctatggaaaaccaaatagttcagtatttctggtgcatgaaagaaaaagggtaaaatcactcaggtttactgagtaatgattgtactatcacaattaataggacagtcagtcttayaatcactttgtagagacttggagactttccttggtcagtcaatcattcagtctgcaaattgtttttgaaaacctgctgtgaaccaagctctattgtaggtgctgggaacacagcaatgaataatgaagatgaaattcctgtcttacatggaacttacataacaggtgggaagttagagatttgagaagataataagtgctttgaagaaaaataaagcgaggaaagggaaagaggagagagtgttgtgttg

SEQ ID NO: 1474 - DNA, 501 bp, Bos sp.
gagtgatagaagaacatttctggaagagggaacatgaggaaatgtagaaaggataaaaatagcctggtatctatggaaaaccaaatagttcagtatttctggtgcatgaaagaaaaagggtaaaatcactcaggtttactgagtaatgattgtactatcacaattaataggacagtcagtcttataatcactttgtagagacttggagactttccttggtcagtcaatcattcagtctgcaaattgttttkgaaaacctgctgtgaaccaagctctattgtaggtgctgggaacacagcaatgaataatgaagatgaaattcctgtcttacatggaacttacataacaggtgggaagttagagatttgagaagataataagtgctttgaagaaaaataaagcgaggaaagggaaagaggagagagtgttgtgttgggaagacataattttgaatgaagtcactcaggtagaccttattgagaagcaaaggcctgaaggaag

SEQ ID NO: 1475 - DNA, 501 bp, Bos sp.
ggctgccgtctatggggttgcacagagttggacacgactgaagcgacttagcagcagcagcagcagcctctaaatatgcacagacttgtgaatactttgaactagggaaatcttaaagaacacctaggtcatcattgtttttgcagaggaagtcactgagccccataggagtgaagagatgtgtcaaggtcatatgaccagtctggagcagggaaggataagcagcgctagcctggctgtctttccagctstctgcgtctggcctttccctattgccattctgcacatactgtaggaaagaggtgggtggacgttcagggaatgcaaactcatgctaatgtttgaatattaaaatttaatattgtaattttagcctaaaacaaaaccaaattaaaaaggtacatctgctgcaaaaaattaaataatgcatttctggccccagtacacatgattctgaataatgtggcttgtggatttattgctggcagcagggctgccaag

SEQ ID NO: 1476 - DNA, 501 bp, Bos sp.
cacctcctgcattgaaagtgtggagtcttaaacactggaacatcaggggtgtcctcaagaatctagttttaacaaactttctccttagtttttatgcacactaaattagaaaataactagtttagagggtaatttcagtacagatctagagtcaaatatcaatttgcattaggggaaggagtgaataaaagatgcaaatattgaagaagaaagtaaaatgtaatgtgaaaaaactttgaaggaaggagcaraaagattggcaattgccattaggctggtaactgcaaattgtattcaaaaatctttccttcattaatgaagaaagcaaaattattagataataattttttcacttaggatttttgttttaattctgattttttgcaaatggttgaatgaatctaaagtgaaaaatcaaaggaatagtaatttgagttatactgtgatataaacaccaggatatattttatctctttatttcattgctgctatagaagacac

SEQ ID NO: 1477 - DNA, 501 bp, Bos sp.
tactttctgacagctggtattgtgcctttcagttatatgttctggacttcagtttggatttctcctgggctattctgcctgtttgtgatttcccgaatgggttacatcctgcttggctgctgttgagttctgctttctgcttgtttgttttaaggctcattggattttcctcctaaattaggtttgttttgcttttctaagagcattcatacttttttatcctgcttttgtattgctaccgtccctgtatytgcaatcaattcatgaatttttatgttttttgaatcttttcaaatatttttggttttatattattttaaactatattgttttcttatttatatattcatatttgttttcttcagaacaaatgttactgtatcgtcaatcctgtgttacactgaaaattgctaaaggaataaaaataaaagcaaatatgaagcaaaattattgttcaattgataattatgaaacagtgaacattatttcatgaagatgact

SEQ ID NO: 1478 - DNA, 501 bp, Bos sp.; identical to SEQ ID NO: 269

SEQ ID NO: 1479 - DNA, 501 bp, Bos sp.
ttttcagatactggataacaaatttcacaggactttggaaaacaaatgaggtgaacctacaattgactgacagaaaacgaaatataaataaacattatcccaatgactataactgaccccaagttactgcctgaaggaagtttccaggccagggtacaagaagggatactcaaagagagcctagaagtcttgctaaggtaaggagaatagactggagttatggacatcaaggcaaacaaacttgtgaggcygagtaacaaagaagagggagataccaagaaagagagtgctctggaaatctgctggggaccctctcagtctttttctgagtattgatctagtgagaggaaactatctgaagtgaaagaaataaccactgatagacaatagctgaacaattcctggagttcacacatggttgaaaatactttgtgttcccaccaaccagagtggacagatctcatgatacacaggatattagaaagaattctcaggaaaaaa

SEQ ID NO: 1480 - DNA, 501 bp, Bos sp.
acgtgcgcactttctgggaagtttctcgaagggtttctgcactcaaaaatgaataagagtcactcttgtagtgacacaccagccaaatgaatggagctcttcactcttaagtttgtatcttctctccacatactattcttttccatctttgtctactgtctctacagattgttctgtgatcatttgactggcatacttgcctcatgcattacatcttaaaaaaaacaacaacaaaaaaagcagaagccatmaccaccaccacaaagttgattttcatataactgaacggaaatgataggctgaaactaattccggtttctttattgtttgacaggttcaaccttacggggtctgagaactgtgcagttctgaacagtgcagagatcagcagcacagaatgtgacaagaatttacactggatatgtagcaaaccctccaaataaagaggaatcatatttgcttatagacattctaacatggaactctaggaaatatgacaac

SEQ ID NO: 1481 - DNA, 501 bp, Bos sp.
gcctgcaatgcaagggacctgggtttgatccctgaatctggaagattgcctaggaaagggaacggctacccactccagtattcttgcctagagaatttcatggacaggagcctggcaggctacgaataggagcctggcagttcacaaagactcagacacaacagaacgactaaaactttcacactttcactaaaatgtctatttcatagaattgatgtgagggatgaaatcatagattgtattatacattrgcacatagtagatgttaataagtattcactcatttctttccccattcacattccttacactacagaaaagactgaaacctattcttcaaactatcttcatacctccctcagaatttaaatactaattatgtactctgtttgaatgctttttttttcttttcttaacatcagaaacttacttagaagaagcttcatttctcaagaattctttataatagtattcatcatgtcagttttttaattagcttta

SEQ ID NO: 1482 - DNA, 501 bp, Bos sp.
gatcttcccagacacagcattccatgaacacagacacagatggaagagaaagaggggcaaggtccatcccacattcccaggcttcccgggggcattgccccttgcccctgtaacttaatgaacttacagcattacggggccctcttcatgtcagccacgacagagatcatattttgtgaattacaggaccatctccctaacgtttcttattcagagataaaaagataactatttgggggaattccctggtkacccagtggttagactcagcactcactacccctgtcctgggtatgatccctggttggggaacaaatatcccacaggcatgaccaaaaacaaacaaaaaaactcccatttttaaaaatactgtgtgtgaagtggctgctacagggaggaggaaagaacaattgggcacacccggcctccacatcagctctgcctcgtcctgctgaccatgtcttccagcctgagctcttcatgcgagctctgcgtatgtcc

SEQ ID NO: 1483 - DNA, 501 bp, Bos sp.
caagaggctttttagttcctcttcacttcctgccataagggtggtgtcatctgcatatctgaggttattgatatttctcccggcagtgttgattccagcctgtgcttcttccagcccagcgtttctcatgatgtactctgcgtatgagttaaataagcagggtgacaagtgactccacacaaatgtgcgttgagtatatattgttgctgttgttgagtcgttaagttgtgtctgactcttttgtgatcccrtggattgtagtctgctaggctcctgtctgtctatgggatttcccaggcaagaatactggagtgggttgccacttccttctccaggggatctttctgacccagggatggaaacccgggtctcctgcattgcagggggactgtttaccactgagccacaggaaagtccattgagtacgtgactgaggctttaaagagtgatggggtgagaaacatctcctcacaggagttcagggcttgttaaacaaattca

SEQ ID NO: 1484 - DNA, 501 bp, Bos sp.
ggcgtgtatcttaaagaattagccgaaatgatctaggaggagtttgagtgatagaagaacatttctggaagagggaacatgaggaaatgtagaaaggataaaaatagcctggtatctatggaaaaccaaatagttcagtatttctggtgcatgaaagaaaaagggtaaaatcactcaggtttactgagtaatgattgtactatcacaattaataggacagtcagtcttataatcactttgtagagacttgragactttccttggtcagtcaatcattcagtctgcaaattgtttttgaaaacctgctgtgaaccaagctctattgtaggtgctgggaacacagcaatgaataatgaagatgaaattcctgtcttacatggaacttacataacaggtgggaagttagagatttgagaagataataagtgctttgaagaaaaataaagcgaggaaagggaaagaggagagagtgttgtgttgggaagacataattttgaatga

SEQ ID NO: 1485 - DNA, 501 bp, Bos sp.
tctgtttgatttccatttgtccgttaacttgtgccacacacttgtttgagtctgctctattctgggctctgggtcactgaggaggagaatataggggtgaatgggacaagatacttccccccaacaaggactccattgctcttcatagagacattaatagggaaccagttatggaaatccatgttttaaactcataattccagggcttcacatcttggctttatattattgcatttcttcttattttcttmcacaagtaatgcatgttgttagtggttgttgtgagactgataactcatctgtaattccaccactcagacaagatagagtatttccttctgtatttgaatttcacctacataacaagttgtttctgattgttattacaacagtgtagttattctatgaatataatttacttatctttattgagcatttttccatcattaactgtcatcgaaaacttgggtgttaatagttgtataatattttatggtgtgg

SEQ ID NO: 1486 - DNA, 501 bp, Bos sp.
gctttacttagatgcaactccatatctcataagaagtgaatgcattggatcaggagagaagtgttatatattcaaacaactaaatgtttgttgttgcttttataaatgtgattaaacagtcattgggcaattatttgtatctaaaaactaatatgaagaaataaaagatattttgttccaaagagaaataggaaaaactcagctagtagctagtattttccctcacatgccctaataatattttattaaawtttttttttcacaaatagcacagtagatagttgacttgttattaagtctgcagtatttgcaattattttggaagcatgcatgcagatccagccaatgactgactaaaagtgcaaagagaaggccagagaagtgtcattttttatttatgtaaaaaaaaatcaacgaagtgccgactcattgggaaacacctagatgctgggaaagattgaaggcaaaaggagtaggcggaagcagaagatgagatggtga

SEQ ID NO: 1487 - DNA, 501 bp, Bos sp.
aacaaatgaattttcctttttgccattaccagcagatataaaaaagcacttcaaaattcttttttaaaatattggttctgtctttagaaactattcatcttctgaaactgtttttcactatatttgggggaaataaagagagtgctctgaaaaaaaaaaatgaaaagcttttctaagccaacagcatttggtgaaaactaataatcctgctggtatgaagttgaagttttatttcctttttcttttttttwaaaataaaattaaggctcaaatgttctattaaatgctcattgcttatgtatattatattaaggcttataaatacacctggtgaattaaattcaccctggattgaattaacacctgctatgtgagttatttgctttatgtaatcagtaatctcaaggtttcttccctttctctggaagcacaatttaaatattaacctaatctttaaacggcggctgctgctttctgacatttggaaaccagtcacccgtg

SEQ ID NO: 1488 - DNA, 501 bp, Bos sp.
tgctcatcttagatatcaaacttcctggaccaattccctagttttatgatttttgtattttctagttctttatcttttttcccatcctattctcaaaacattttttcaattttgtctttcttttttttccctattgaattttcagtttctttctgcaggagagagttaacacacaggtctgattgtgctgtctctaggaggttttaaagatggctcctggcaactgggtctctggtatgcactccatgctrctaagtgataaaagtgttaaagtgttttaagtgcctggggcactgaattctgttctattagcctgactagagtgtttgtgcaaacaatgtgatttaggatgaacacctgcttttcttctgacagtcaggaacttcggtaattgtggctggttccacaggcagagagtacttaaatgatcagcattaaaaattgtgaactgtgagtcttaagatggcttacctggcaaaaatactgcacgggtttctatat

SEQ ID NO: 1489 - DNA, 501 bp, Bos sp.; identical to SEQ ID NO: 933

SEQ ID NO: 1490 - DNA, 501 bp, Bos sp.
ctcgagggccccaggtacattgagtttaacagaccccttcctatgtgaaagtactgaaaattttaatgattgcattcattttaatgcattgcgtatattttaatgtttgcattcagggtgaactatattcacttttcccttcttattaaaaacaaacaaaacatgaaagcattttcatggcccctaaaagcttccttttatgtatgctatcgggcccttgataccatacatgtcatgcctcccagataaamtgtccttacaccattatgaacatcttttccttctcctggaaagggaggttgtggttcctttgcaggcgtgttgtaggcattagctctgatttgagcaaaagcttatagcatgtttactacctagcacaagttggagttgttgtacgtgagccaagaggaagccttccaccaaagagcaagcctttgtacaggcatttaaggaaggatcagacgtgtccttgcactgcttaatttttcttaatgaatcaca

SEQ ID NO: 1491 - DNA, 501 bp, Bos sp.; identical to SEQ ID NO: 520

SEQ ID NO: 1492 - DNA, 501 bp, Bos sp.; identical to SEQ ID NO: 566

SEQ ID NO: 1493 - DNA, 501 bp, Bos sp.
tttgaccttgaataattggtaaatctatcatactggttcataccagctgtccaataaccctgcctgtaggcactggggttttcaagccatattctagcaaattccttccagtgctgacattcttatgaacagaatcctctcattttcttcctcaagaatacccttcccttctactacccagacacttccttcatcatcttcgcttgtagaaatctaagcagcctttcaggccaagttcaaattccacttcytgcatggatacctctagggtctccaagacaaatttttattttgacaccactctgctttgtaatcagggttatgcctgtagcattgtccatggcttgaatggtccagtgggctgtaacttccttgaacctgggactgtaccttactaatctatctgaccttttgtatctgcctctcacttaaacattggaagaactgaagctgaagctgaacctccaatactttggccacctgatgcaaagagccaactca

SEQ ID NO: 1494 - DNA, 501 bp, Bos sp.
aataaaatgtctctctgccttggggtttctcacctgctgtgtttgcttgatttcagaggtatagaggtaggttaaccgccttcctgaccttgacttggttccttggtgttttatttcttatattttaaaatgtaattatgactgaagattaatctcagagtcgaaaccaaatatgtatctaaacaaaggatagttttcatagccacccattttaaagatcatgtcatttccaaacctaggactgagtccgwattctctttgtgtttgctgacacttgagctgctggatttctgagggctggttggtgaagtcagggtctaaatcccaacatgtagacatgtgttggggacatcctggctgtatcactgctctggatgcatagctgatattcttatgggaaactgttattctgcaaaatagcactctgcaaatatatactacgtaaccctctctttattctacataagaaaaaataactttggggtttgaaccgaatctttt

SEQ ID NO: 1495 - DNA, 501 bp, Bos sp.
aggtgtcgtccatcctgggaggatgacaacggaaatgactttggacagaaagaaaactgtgaaatctaatagaaataaaagcatctccagcttacatgaggcctggagaagtcagcataatttatccctggcctcaggcagaattaccataaaccatctgacatagatatattttgccatgttaaatgactttcagaaaaggaaggttttccataattttccctagtaactcattgttgtgtttaatagcrtcactgtcaagaagcaatttctcatgctgtatctaacttgtgattctatagctttgaattcatgtccactttcatttcatcgggttgtgcatagctgcttccggccactgcaagatatacttaaccaaagtatagcctgacttgcaactttcaccccctaaaccaaatacagtctctttgatttttaaatacagttggtttgctttggcaaaactatctttcattctccatgcctcttgcttttcataaa

SEQ ID NO: 1496 - DNA, 501 bp, Bos sp.; identical to SEQ ID NO: 980

SEQ ID NO: 1497 - DNA, 501 bp, Bos sp.; identical to SEQ ID NO: 989

SEQ ID NO: 1498 - DNA, 501 bp, Bos sp.
cattaattatattgtcgtgtgtgtaaacatagtttatttttttggaaagattttacagagaggttgtttagaacaaaaaagatggagtcgtatgatacataaagtgattgggggggtttccagaacatagtcagatgtgccaaacaccttttgttttgattaaagataaggtactttcgaatgttagatgtaatttggtgtgtgagtccacaaggttattagacttgttcccatgctcgcgtttgtacatrgccacctgtgatcatctgctgttctctgaaagtctgggaaattagagtaaactttagcctctgtctttgaagtagagccctggctgtggatggccctctctcagttgtcattctcatgaccagtagttacacggcccttggtgggtgaacaggaagcccactctcagcccagggtggccctttccttccagtatttcacacaaccctgggtcttcgccattatgtggagcccaccaccatggccctgtgc

SEQ ID NO: 1499 - DNA, 101 bp, Bos sp.
atgcgggaagaggttattacccttatccgttctaaccagcagctggagaaygacctcaatctcatggatatcaaaatcggactgctggtgaaaaataaaat

SEQ ID NO: 1500 - DNA, 501 bp, Bos sp.
ggggtgaaaaatcttccttttatgtacagcacagatacgcgcagcatataaacagatagcatatctgtggtattaaattttcatggggaggaggttagtgaggaaaacacctctaagaagtctccttagaggaggtgacagtgaaaagcagagttgagaaatacggaaatagagcagatttactgacacatggacgtggacatccacatgtatactacacccacacgtgtgactatcaggggtaacacatrctacagcagattgacccagaaatttgacttggtggcaggagcaggactgaattctgtgttctttgtgacattttctgcaactaagagtcttcctgcctgaatggccattctcattttaactagcagacattgcagttaacacgccatacaatcttcacatgcagataatccatattctctgtcattctctggaaaaagctgcctgttaggaatgagctgggtcaacaattcatttcaccaagatctgctg

SEQ ID NO: 1501 - DNA, 501 bp, Bos sp.; identical to SEQ ID NO: 927

SEQ ID NO: 1502 - DNA, 501 bp, Bos sp.
atctgacttgcatggtctctgcctgtccattcagtggaggccacatgcctcatttgtgtcctttgacaccatctggttcccactccctcaccaacctgctttttcagggccatcattttgggttgaggaagtgtacgctttagctctgtgatgacaagatacatatcaactgctgcttttcctgcctgacaacttcctaggaagtccagagactaactttgggacaagaaggtttctctcctatcctttcrgtactactaaagcctttgactgtatggatcacaataaactgtggaaaattctgaaagagatgagaataccagaccacctgacctgcctcgtgagaaacctatatgcaggtcaggaagcaacagttagaactggacatggaacaacagactggttccaaataggaaaaggagttcgtcaaggctgtatattgttaccctgcttatttaacttatatgcagagtacatcatgagaaacactgggctggaaga

SEQ ID NO: 1503 - DNA, 501 bp, Bos sp.; identical to SEQ ID NO: 351

SEQ ID NO: 1504 - DNA, 501 bp, Bos sp.
tcaccttctccaatcatgtttctccattccatgagtgaccgctgcaggtgctcaaggccggtttcccaaagccggacacggcctcccatatcaacagtgacaacgccacctctgccccactcggccagcagtgcgtctgtgtccgagatagtagacagccatgtggtatatggtgagagagagtctgacctgaaaaagaatcacggcgttcaaccgattgaagcccagggaatgatgctagttcagctcarcttacgttcaacttgctgtaaagaattctcatagttaagcaacaagaacctgctgtacagcataaggaactacactcaatgtcttataataacctataatggaaaaggatctgaaagagaatatatatatgtataacatatacatacatgtatatacatatgagtgaatttgctgtacaattgaaactaatataacattgtaaattaaccatacttcaataagaaatataatgtttaaaaacacattaaa

SEQ ID NO: 1505 - DNA, 501 bp, Bos sp.; identical to SEQ ID NO: 259

SEQ ID NO: 1506 - DNA, 501 bp, Bos sp.
gaaactgattaaagcttaaggttaaaaaataaaagttgatgattacatctgcatgttatgaggtgaggaacctatatatttaagcgctgacagacagaaaaggcacatttttactttttcactatgtcaaatgatagacttgtcttttcctgagtccccacattattttagctgttttagcaaactacatttgagtctctgggccagaagcttctatgaccgtggcatctgcaaataattgataacttaaygtgccccctcaagaggtaaggtcaattcaagcagtacctgcatgtgtctgtcaccttctccaatcatgtttctccattccatgagtgaccgctgcaggtgctcaaggccggtttcccaaagccggacacggcctcccatatcaacagtgacaacgccacctctgccccactcggccagcagtgcgtctgtgtccgagatagtagacagccatgtggtatatggtgagagagagtctgacctgaaaaagaa

SEQ ID NO: 1507 - DNA, 501 bp, Bos sp.
agcataaggcaaacacccaaaaaacattgctgttcaagtttaacttcagctaaatataacagaagcccaaatacagcctttaaaaggtgagtttcctgcttctttcatgaagagggcagtacaggtctggcacagcaaggctggcacagaaccattaacatcccaggctcctgacttaaccatctcagcacaagcttccatgttcagtgatgagccatagtccaaagtggctgccagagctccagccattytgttgggagttccaagcaggaaaaagaagaccaagagaagtgggaccaaaggggatcaccttccagtgaatgagcgaacttttaagagcttttttaaaagcccatctgttgccttcagcttatatctcactggctacctcgatgataaagcggggctgggatgtggctccaatgccatactaaataaaactggggttttcttgttagtgaagaagggaaaaatggatactgaataggcagactaagagtt

SEQ ID NO: 1508 - DNA, 501 bp, Bos sp.; identical to SEQ ID NO: 621

SEQ ID NO: 1509 - DNA, 501 bp, Bos sp.
aaacagttatgagaattatttgttcaaaagttatgctttgaaagagtatgtgataagaaatagctgtcatcattgctaccaatcagatacttttaatgaataaattgaaaataaataattaaatgagtaatcttaagtatttacttcaacccataggtaatttttaaacagtgatgagaaagtaactgctttctgagggaaatttacgctacggagagagaggaacttggaactagatatttggaagtgawgctactaccctcgtgtgatttttttgttatattatatgctaacaatgacaacaaaactcctaaatatatatgttataaaaacttaacaaaaatacattaaaatattttctaaaatgaggtatattgctttgaaccccttggataaaaatataaaaatgataaaatgtaagcttgaaagaacaactgactgacattcaggaaagtggaaatttagtacctggattctaagaacggctacaaatctccagat

SEQ ID NO: 1510 - DNA, 501 bp, Bos sp.; identical to SEQ ID NO: 58

SEQ ID NO: 1511 - DNA, 501 bp, Bos sp.
ctcattgttgtgtttaatagcatcactgtcaagaagcaatttctcatgctgtatctaacttgtgattctatagctttgaattcatgtccactttcatttcatcgggttgtgcatagctgcttccggccactgcaagatatacttaaccaaagtatagcctgacttgcaactttcaccccctaaaccaaatacagtctctttgatttttaaatacagttggtttgctttggcaaaactatctttcattctcyatgcctcttgcttttcataaaacatccaggctaaatgtgataggaatattactatatgaaaacaagatgaagtcccatttctgtatctcacaatgagagtgtgaaatgaaagagaaatattaggtttgggagatgagctatatacctccttaggatgtgagcagcctggcacttccgagaatattaaaaaaatatgctatattttcctataaaatacagtattcatgctgaatttattgacatttaagaa

SEQ ID NO: 1512 - DNA, 501 bp, Bos sp.
gcatgagaagtgaaactagagagcagatcatcattatgtttgatttcagccaggaatatgtgagtcaagccactcaacttttccgccactctgctggtaccctaaataaccataaaaagtgccatgagtattgatttgggggttacaaattaaatgttagtgagtaggtgaattcacaaatgcagaatccacaaataaaaagaattgactgtgtaccacaacttgaaggagacacatccaacctcgttatmcttaggcacctctaagtcactccctggtacactgtgaggtctcctggtttctaaggtccagcagcactgaccctgttttatgatatattattgcccagcaatcatgcagcaaaattcctagctgccagagacacagcattcagttcatgtttgttgaattaatcacagcaatctggctgaccctaaaggaagctttcgtcattactccccgaaaccagtgttacaaagcgattctatattatttccaata

SEQ ID NO: 1513 - DNA, 501 bp, Bos sp.
aggatgtctgacatccacttctgtttgaccttgtattggaggtttcagccacagcagttaggcaagaaaaagaaaagacagccagactggaaaggaagaagtaaaaccattttcaggtgagatgatttttgtataaggacgccactaaaaaactctcagagcttattcatgagttcagcaaagctgtgggatgtaagaccaatatagaaaaatgaattgcatctctatacacttgcagtgaacaatctgarggttaaattaagaaaatcatgtcttttacagtagcatcaggaatagaatgcttaggaataaatgtcaccaaagaaatacaagacttaaactctggaaatgagtaaatattttgaagcaaattaaaggcataattaagtggaaagacatcccatgtttatggattggaaggcttaatatcattaagacagccctgcttccaaatttaatctgcaaattcaacacaacccccaatgaaaattccagctggac

SEQ ID NO: 1514 - DNA, 501 bp, Bos sp.
ccttggtagcatggggggatgctgacgacgtggcagaactgagaacggatacaaaggtggagctggaaactgattaaagcttaaggttaaaaaataaaagttgatgattacatctgcatgttatgaggtgaggaacctatatatttaagcgctgacagacagaaaaggcacatttttactttttcactatgtcaaatgatagacttgtcttttcctgagtccccacattattttagctgttttagcaaacwacatttgagtctctgggccagaagcttctatgaccgtggcatctgcaaataattgataacttaacgtgccccctcaagaggtaaggtcaattcaagcagtacctgcatgtgtctgtcaccttctccaatcatgtttctccattccatgagtgaccgctgcaggtgctcaaggccggtttcccaaagccggacacggcctcccatatcaacagtgacaacgccacctctgccccactcggccagcagtgcg

SEQ ID NO: 1515 - DNA, 501 bp, Bos sp.
acaccattcattatcatgctgagagctttcttttcaaggttcgtgtaagagaaatgctttggggaagacattgaattaacagattcaatatatttccatcgtgaaattagagttatttgacaataaggccttcacaagccacaaggggtggtagtgaatgctagagaatggaacagagaaatatgattatgtccttcccctgacaaatatttcttaatatgtatttttttgtgctttaaaaagaaaaaaamctctctgagcttcaaatgagagttttgttatcagttgctgctgctgctgctgctgctgctaagtcgcttcattcgtgtctgactctgtgcgaccccatagatggcagcccacattgggataattccaaccactctggagtatgctattaatatcgcaaatgaaggcatccatagtattttgtcccttttcctttttttcttttctttttcctctcctgtttcttctctatgtgcttcaccaacagaatag

SEQ ID NO: 1516 - DNA, 501 bp, Bos sp.
tctgaagggatcctttctttgaatcatatagtgaatttgtcttttaagtatatggaaacatttagtctttatacatctgtaaaaaaattttttttaaccattttcctttcaagcaactcaactatagtttatattttttgaagtgagttctgttcttatcaatagtgttttaatcaaggctaaatgattaaatgttggtctgaaaaaatggaaagggacttccttggtgatccagtggttaagatttcacwtgccaatgcaggtttgatccctagtcagggagccaagatcctacctgcctcttggtcaaaacaccaaaacaaaatgagagcaacactgtaacaaatttgctaaagactttaaaaatggtccacatttttaaaaacagaagttattttgtaaaagagaaaaagtggaatgaagattgatgaagaaggtaaatatcccttctgtttgggagaccctgacatgaaaggcaaccattcattttccatgtctgct

SEQ ID NO: 1517 - DNA, 501 bp, Bos sp.
tcctgggggttcttgcctgtttccttttccttccgtatgatgtcttcacgctgttgtctccctgtgcgaggataaggcatgtcctcctgtttactcccgttattttgatttgggtccataggatgtggaaagctgtggtccattagactgatcttaatctgtctgttattaatattttcatgactctgtaacggttactctcacacatttgtatgactattttagccattttcttcctgtgtgtctgggcrtcctaacctgcttcgagagagcccccagcagccaccctcatgaccacccccatcacagtacttacatgtttttctgctggtctctgctgagcctaatgggtacttgtcactattgaactgacgatgtcctgttcagtggactttacaggtgaaatgctccaaaacatactgccaacaatgccaatagctttctgcagacccagcgtgaagaatgaattgggcatgttctaggaggtgacctcctaggaag

SEQ ID NO: 1518 - DNA, 501 bp, Bos sp.
taaaaaataaaagttgatgattacatctgcatgttatgaggtgaggaacctatatatttaagcgctgacagacagaaaaggcacatttttactttttcactatgtcaaatgatagacttgtcttttcctgagtccccacattattttagctgttttagcaaactacatttgagtctctgggccagaagcttctatgaccgtggcatctgcaaataattgataacttaacgtgccccctcaagaggtaaggycaattcaagcagtacctgcatgtgtctgtcaccttctccaatcatgtttctccattccatgagtgaccgctgcaggtgctcaaggccggtttcccaaagccggacacggcctcccatatcaacagtgacaacgccacctctgccccactcggccagcagtgcgtctgtgtccgagatagtagacagccatgtggtatatggtgagagagagtctgacctgaaaaagaatcacggcgttcaaccgattgaa

SEQ ID NO: 1519 - DNA, 501 bp, Bos sp.
gataaaaagataactatttgggggaattccctggttacccagtggttagactcagcactcactacccctgtcctgggtatgatccctggttggggaacaaatatcccacaggcatgaccaaaaacaaacaaaaaaactcccatttttaaaaatactgtgtgtgaagtggctgctacagggaggaggaaagaacaattgggcacacccggcctccacatcagctctgcctcgtcctgctgaccatgtcttcyagcctgagctcttcatgcgagctctgcgtatgtccactgggtgcttttcagagtgaattcctccgtgaagtctggactcacacccagctatgctaggccatctggatttatctgaatagcaggcatttcaaactcaggtgtaagaggattcctgatctcaagtggccccctcctccctgggagcccctcccctcagtggctaacacagatgcagtgctcggcgagtgtgtgcgcctcaggtgtcccgccc

SEQ ID NO: 1520 - DNA, 501 bp, Bos sp.; identical to SEQ ID NO: 414

SEQ ID NO: 1521 - DNA, 501 bp, Bos sp.
gactgcagaggaaatctcatgtagtatgcaaatatatttaccccatgtgaagtgtaaaagtcactcaatagtgtccaattctttgtgactccatggtagcctgccagtctcctctgtctatggaattctcccagcaagaatactggagtgggttatcatgccctcctccagaggatcttccagacccagggatcaaagccaggtctcctacagattctttaccatctgagccaccacatttagaaacatgytttcctatatcttaatgtctcatggcaactatacttcagagtaatttttaatccaataaatattctgcccttacatttacaatttgtaacataagaaaaggagcactgattcaggtagtatccgaaccgctgtgaaatattggtgctgaaacaaagactcccatagagacccagatttccatgataaaaagagaaaggtgagtcccaaaggcactgggattatctcctcacatatataatcttcaaatcc

SEQ ID NO: 1522 - DNA, 501 bp, Bos sp.
aaagtcaaagagctaatacataatatacacagtctaactttagagggtaagccttctagacttgaaataactagctggtacctagcccaggagtgaagtacccccaaaattactaccaattacagcagaatattatgtaacatttaaaaagaatgtggtaaggacatgtatactgatgaaaatatcaagatacagaagagtattcgtgggtattcacatattgtttctaaaaaacaaaaacaaactagacrgagatacttcagtcttaccagtggacctctaaaatgcagaatttggagggtagagagaaagaaaatggagaatttccctttttattttatatccctctgaagagtataaatttgttatgaattaatgataaaaacacctgctggagatttgccaaaatatgaaataatttttttatcagcctaagtaacatctctttataaacaattcaccttctggcatcaatatgtatcaacacacatgaaaagaaaa

SEQ ID NO: 1523 - DNA, 501 bp, Bos sp.
actcattgtgcttttgatttgcttttctctaataatgagcgatgttgagaatcttttcatgtgtttgttagccatctgaaagtctttggagaaatgtctttttcccactttttgattgggttgtttttctggtattgagttgtatgagctggttgtatattttgaaaattaatcctttgtcagttgtttcatttgctattattttctcccattccaagggttgtcttttcaccgtgcttatagtttccttwgctgtacagcagcttttaagtttaatcaggtcccatttgtttatttttgtttttatttctgttactcgaggaggtgggtcatagaggatcttgctttgatttatgtcatcgagtgttctgcctatgttttcctctaagagttttatagtatggagattactttaaaaactagcaataaaaccaccatatgacccagcaatcccactcctaggcatataccctgaggaaatcaaggttgaaaaagacacat

SEQ ID NO: 1524 - DNA, 501 bp, Bos sp.
gatttactgacacatggacgtggacatccacatgtatactacacccacacgtgtgactatcaggggtaacacatgctacagcagattgacccagaaatttgacttggtggcaggagcaggactgaattctgtgttctttgtgacattttctgcaactaagagtcttcctgcctgaatggccattctcattttaactagcagacattgcagttaacacgccatacaatcttcacatgcagataatccatatkctctgtcattctctggaaaaagctgcctgttaggaatgagctgggtcaacaattcatttcaccaagatctgctgacccctcctctgtgggagggttgcagtgtctcccatggggtgtgcaaagatggaggaccaaccaaggccctgagtcagggacctccaagtcagggtcagagtgagggatggaacttacaagcagcctatatcctgtggaaggatggctgatgacttgaatagcccaagacagggga

SEQ ID NO: 1525 - DNA, 501 bp, Bos sp.; identical to SEQ ID NO: 348

SEQ ID NO: 1526 - DNA, 501 bp, Bos sp.
ctaataagatttaatacggtacattgtataggcacccaaagaacataattagtctaaataatgtagaatatattgaaatactgaccactaaagacctaagaccaggcaggataccccagaattttctatgaaaggtgatcaaatgtggtaagtagctcctttacactataagagatttagggtttacttcattcattcaaacctctgaaaagtcctgtaaaatgaagatatattttgtttgctgtaatctrtgcttcttaaacttcaatcatagaacccatcctaccttgtaacacttttttacatccttcagaatatacctcatgaaagagaacattagcctatatccaatatcagtttttctttgaaaaaatacaacataaatttggagacagacacaactaggcttccgtctggcacttgcaaacattgagctctcacagcgtaagctatttcagctctctgagccttgcttttaccttttgaaaacatacgttttcg

SEQ ID NO: 1527 - DNA, 501 bp, Bos sp.
tgcagggaccaacctcacccaccaatgggcaggcagtaacccctgggatccctgaatttcagccctacctatcagtgggccagtactagctccgcaacctccagggccttgcagccagagacccacaggcctgcctcttcccacgagtgggccagcagtagctcaggaccagtctcccccaccagtggatgggcaccaaccccatgaccaccacagccccaaagactgccttgtcaataggcagcccatcygccagtaagttagcaccagccatggacctcccagccccagtcctgtacacgagcaagctattagctctgagataccctggacccctcagtcagactcactgggatctagcctcggttactggtgggcttgcaccagctttgggaaaccctggaccccatagccaaaagtgtcaggaaccagccttgcccaccagcaagcaacactacatctgtgtctcctgaccctccagtcacccaccctggaacctgg

SEQ ID NO: 1528 - DNA, 101 bp, Bos sp.
cagggaaggtcatcccaaagtcactgcactcgggagatgaggccgtcagcwgtgaagagcaacaggcttatttttgcttaagatgtaagtcataggcttct

SEQ ID NO: 1529 - DNA, 101 bp, Bos sp.
ctcttcccctgcccgtcaggggtcttcagcaggttccaagtcgtcatccgycccttctacctgaccaactccacggacatggactagactcgaggctggag

SEQ ID NO: 1530 - DNA, 501 bp, Bos sp.
attcaaccaaccattgtctgtgtagtaaccttaggcagtatttgctgtaaaaaatatacgagtgtaagtggacctgtgccattcaaacacacattgttcaagggtcaactgtgctgattttcccttttcttactctattctttagaatagctgctattagtgatgatgtgtaagaattttaggagctgacaagactgattttgaatgccagatatgccacaacctagttgtaaagcactgaataaaatgayttcatctccatatgtctctggccctcatctgtacagttgggagagtgctatctcctatggctgacctggggattataggagatagcacatctatttacctagcaaatatttcttgggcatctataatttggtaagaagtacattaagtgaaaaagataacagtggtagctatcagtgattagcataagatacagactttacttatgggcagttcatcatatgacagggaagatgaatcactgaactagaa

SEQ ID NO: 1531 - DNA, 501 bp, Bos sp.
acacaaaggataaaatgctgagagttgcttcaaattttaaaaggagtataacaattctttaagacggagaaaagatccaaagaaggcaagccgtacaaactattcttgacatagcttttacaaagaaataaaatattttcattctcaatctttctaacatttgaaattactgggtactaaatataaatatatatgtaccatacatacatacatcaattttacaatttttttcgtttctctatagtccgagrgaagccacgggacttccctggtggcccagacagtaaagaatctgcctacagtgcaggagacccaggttcaatccctgggttgggaagatctcctggagaagggaatagcaacccactccagtatccttgcctggagaatcccatggacagaggaacctggcaggctacagtccacggggtcccaaagagttggacatgattgagcaatcaattgacaacatcaatatattcataacttacagaaagggag

SEQ ID NO: 1532 - DNA, 81 bp, Bos sp.; identical to SEQ ID NO: 1022

SEQ ID NO: 1533 - DNA, 82 bp, Bos sp.
ctcagtggagaggatacaagcagaagaaggcrtaccaagaccgcttggcttacctgcgctcccacaaagatgaagttataaa

SEQ ID NO: 1534 - DNA, 501 bp, Bos sp.
gtggtccatcccagaaaaactaaatgtgtgaacaatcatattttaagtcaaagcaagagctagcaagtcttctataggataaaatataccatttaataaataacatctattaaaatgcttcagggaaaatatgctctaagcataattcttaaaaggatataaccaacccatttggctacaatctgtttttgaacagagcaggtcataaacaaataataatactcaagatatttattgaggcaatctctgcytcattcaggtaccatcgaccccatgaaattgctgtcttttgccaaagccatcttagtcgacttccaaggtaagtggaacaagacgtaagtgaagtcatttcagtgaaaatattagctcataaaatcaaaacagattgcttgaacaccagggagcagttaaagaactaagtgcaatggcactgtgttgaaaaacgtcacaccgatttccatggaaaatgcccattttccaacaaactgaaaagaacaacgt

SEQ ID NO: 1535 - DNA, 501 bp, Bos sp.
acaggtcccaaatgcagagcagcactcagcgagtaagtgaggcatgtgaaggaggatgtgagtgaacggacaccaaggtgagaaggtgagaaagagtaagatggtaagacgaggcgtgaactctagtgccagaaccagaagggaactggagggcgtgtaacagctaattttagtccagcgtcttcacgtcacaaggggtgaaactgagtcaaggcggcagggcttctggtcacttacacatcaacagctgyttctttctggtaagcaagaagggctggaagggggttccctcagttcttctgtgctcagtcgtgctccactctttgcagccccctggactgtagcccaggctcctctgtccatggaattttccagacaagaatcctggagtgagatgccacttcctactccaggggatcttccaaacctaggatcgaacccatgtctcttgtgtctcaattctttaccactagtgcagtggccacccactccagtattctt

SEQ ID NO: 1536 - DNA, 501 bp, Bos sp.
gatcttcattttctgaatgttgagctttaagccaacattttcactctcctctttcactctcatcaagaggctttttagttcctcttcacttcctgccataagggtggtgtcatctgcatatctgaggttattgatatttctcccggcagtgttgattccagcctgtgcttcttccagcccagcgtttctcatgatgtactctgcgtatgagttaaataagcagggtgacaagtgactccacacaaatgtgygttgagtatatattgttgctgttgttgagtcgttaagttgtgtctgactcttttgtgatcccgtggattgtagtctgctaggctcctgtctgtctatgggatttcccaggcaagaatactggagtgggttgccacttccttctccaggggatctttctgacccagggatggaaacccgggtctcctgcattgcagggggactgtttaccactgagccacaggaaagtccattgagtacgtgactgaggct

SEQ ID NO: 1537 - DNA, 501 bp, Bos sp.
aacttttctttatatatttttttaataaaacagtaaaacttttcaagtatacaatgtaaaactacataacctatactttacagtatcattaaataaggtttttatgaatgaagttaaacaaatcatccataaaataatcttttccttcaaaatgtatcatagacctaatttctgattgagtaaatgcaaaaaaaatactataaaattactaagaaatagaagtcagttttataataaaatatattactggragaacaggattcacacacacagtacaatatacataatatagattaccaaaaattagttttaaagatattaataaaatgtctcataacttccaatggaaaatatagggatgaaaatggtaaagatgtgaaaaatcaaagggcaaagaggaaaatttaacatttcactaaacaatagtattcatcccattagatttttataccagtttcaatatcaaattagcatcactatggtgcttttcttgtcagttgg

SEQ ID NO: 1538 - DNA, 501 bp, Bos sp.; identical to SEQ ID NO: 750

SEQ ID NO: 1539 - DNA, 501 bp, Bos sp.
agatttgtgttgtatgcactattcctagttattacatagtataaataaaaatctaggctggtttgaagaatagctttgtggggtttttaaccgagggaccacccacctctagatgggactcttgcatgaagtcagatgttggcaatcctaaataattttagagaagccttttgaatttgtgtgctcacatgtgctcctcccctggagaaggaaaaagctaccccctccagtattctggcccagagagttcygtggactgtgcatggggtcggaaagagtcggacacgactgagcaactttcactcatacgtgcttattgattactgctacattttccctctaggctcagctactagcatatcttcaattcttgctttttttttttttttttttcattctatgtttgtaattatagtcattctacttctagcttctttttcctaaacgtagaaccctagttcctaaaataaggtgctaatatattgatacaggataatgttt

SEQ ID NO: 1540 - DNA, 501 bp, Bos sp.
ctacttttccccctcaatttttagaaaagtataattgagtcatttaaaattgtgattgtttctcatttcactgagcagttccataaaagttaactagaaaaggaattctaaaccatcagctaggaaattacagcaagaaataaattgtttttaatcttttaaaaataaggaaaagaaaatactgcttttgactgggaaaatagtagtgtaatttgttatgatgttatctgtaagagccactgatttttttwaaaaatgcacatctttaaaatgactcacttggtgctaaggattactctatctaccttaataatttaaaaaataaaccatgattctgacatttgtcagtatctcacacatctaacaaatactgaaagtggcaactatcattgttataataattataaagttaaaagcacaaatcaaaagagaaacttcataaaatgttcagcatacacatttgcatgcattttcaaactttcaagatcctgcataggacca

SEQ ID NO: 1541 - DNA, 501 bp, Bos sp.
ctgaaagcccttgtgttgaagacaagtactcaattacttcttaaaaaaaagtccaaaatcttctctttcctaatttaaccattaatatgcccaagactttcttccattatatgtaaataaaatgtctctctgccttggggtttctcacctgctgtgtttgcttgatttcagaggtatagaggtaggttaaccgccttcctgaccttgacttggttccttggtgttttatttcttatattttaaaatgtaaytatgactgaagattaatctcagagtcgaaaccaaatatgtatctaaacaaaggatagttttcatagccacccattttaaagatcatgtcatttccaaacctaggactgagtccgaattctctttgtgtttgctgacacttgagctgctggatttctgagggctggttggtgaagtcagggtctaaatcccaacatgtagacatgtgttggggacatcctggctgtatcactgctctggatgcatagctga

SEQ ID NO: 1542 - DNA, 501 bp, Bos sp.
atggaaacattgttttttaaaaagacatatatgtataatacatttggcaacaaccaaaaattccatcaatagaacactatggagctatccatacatgaaaacatgaagcagacattaaaaatgatgaatttaggaactttcataaactgatgtgggatgtgtacattggtacagaaaggtggcaatttcactcctaggtatttacctgagaaagatctttatacgtgtaccaaaaggaatgcacaaagcayttctatatgtaatggccccaaactggagacggcctagaagttcatcagcattggaatggataaatcaattattatgtaattatacattggagcactatacaaataaaaaggaaggacagctacactgaactgtagatcaaaccagtcaatcctaaaggaaaccaaccctgaatgttccttggaaggactgatgctgaagctccaatactttgaccacctgatgtgaagagccgactctctggaagagacc

SEQ ID NO: 1543 - DNA, 501 bp, Bos sp.
taaagtgtctggcattttcaagaagcagacaggccaaactggggtgtctggagtggaaaaaaatgaatgtaacaggaaatgaacttcctgtaacatctagtgcttatcttcaggactttatggctttcctcagcagattcctaggagtcagtgaagatgtgcacactctctacagtaatcagatgctacgatgctattcgtttatgaattcatttactccttctttcatcagttctttagtcaacaaatayttactgagcacttttaactggagcttccgtgtgtggaacgcttgctgtatactgagaaatgtctcatgtgcattcttagataaccttcacacgacttgtaaagtacatttatactgccattttcagatgaagaaactgatgcatcagaagcatttgtaaaccacggtgtctatcttcaaaagttttggtgtctcataagggagttgagataactccacacacagggtgtccgttcgtgagtagcatggct

SEQ ID NO: 1544 - DNA, 501 bp, Bos sp.
agtgagggatctctccttaccccctcctgtgaccctcacatatgagaccacctgtctgctcacacacgatgaagccctgtgccatcaccacacgtgagcctctggttgtagctcagagacgggacaagtcctagtctctcttcaggtagatgacccgccaagagccccaatacatgaggctgggaggttctcaaaacaaacaaaaatgagcttagagctcaactcctaggacttaaatggacttaaatgarcaccgagattaaaacgtttcttgggctcagactgcagcctagaagacagatgtgagcctgactgctgtgagcagcaagggaggagggtgggagagaagcaagcagctggcaaagtcagggatgaggaagagaagagaccgggggaccctgggtgcccaccaagtccgcagtgcagacccatgagcctgaccacgacctcatcctccggggaactttatacaaggctctctactcactgcagtacttcgac

SEQ ID NO: 1545 - DNA, 501 bp, Bos sp.
gcaaggatactggagtggggtgccattgccttctccaaaagaggctacagaagcagcttaatagctgctctatactgctgcctctatactatcattaatagctgtctctatactgctgcctctatgcttgtccagatgtaaggaggctttacttagatgcaactccatatctcataagaagtgaatgcattggatcaggagagaagtgttatatattcaaacaactaaatgtttgttgttgcttttataartgtgattaaacagtcattgggcaattatttgtatctaaaaactaatatgaagaaataaaagatattttgttccaaagagaaataggaaaaactcagctagtagctagtattttccctcacatgccctaataatattttattaaaatttttttttcacaaatagcacagtagatagttgacttgttattaagtctgcagtatttgcaattattttggaagcatgcatgcagatccagccaatgactgacta

SEQ ID NO: 1546 - DNA, 501 bp, Bos sp.
aaagctgtagtgtcacagagacaaccactctctggagaacttttcccatgtaaggcagagtagatgtgattaaaccaatccactgtgggtgcatcttacaggcacagtgttgatgcaaagctcgtatcaccgcacagaggaacatgccttgagatgtgatcggctgggcgtgcaaatactgaagagaagtcatgggctgatggggattgatgtgctccagatcagacaccacaaaatcaaaacctgtttcrttctcttcagggatagtcattaccctgtgttcgagaacaatgagcctctgaagcactttgagaagttgtgactggagtgtgctgccactgtcaaattcatcttcggagaaattgatcaggctgtcctctgagaaaccttcttccacggcaatcacgttcttacctgccatcttttcactgtgccatttctgtgcactaaagatagatgacagcaaacagtgaagaatcactttctgaactttgcacttag

SEQ ID NO: 1547 - DNA, 501 bp, Bos sp.
agatatattttgccatgttaaatgactttcagaaaaggaaggttttccataattttccctagtaactcattgttgtgtttaatagcatcactgtcaagaagcaatttctcatgctgtatctaacttgtgattctatagctttgaattcatgtccactttcatttcatcgggttgtgcatagctgcttccggccactgcaagatatacttaaccaaagtatagcctgacttgcaactttcaccccctaaacyaaatacagtctctttgatttttaaatacagttggtttgctttggcaaaactatctttcattctccatgcctcttgcttttcataaaacatccaggctaaatgtgataggaatattactatatgaaaacaagatgaagtcccatttctgtatctcacaatgagagtgtgaaatgaaagagaaatattaggtttgggagatgagctatatacctccttaggatgtgagcagcctggcacttccgagaatatt

SEQ ID NO: 1548 - DNA, 501 bp, Bos sp.
gggtgggggcaccttgtcagcatttcaacgctttggtttgtttacagggtgctggatgtctgggttgtcgccttggcccaccaggatgatctgctgttaataaagtgtttgtatcgtatgtaaacctgaggttttgtctgggttgtcattagatttccaaaatccttctgtggggcccccaggtggtcactgacccagtgtactctgaaaatggggggtgttcgccaacaaggcattttctttgtgaggcrggagaaccatgtgtctatgtacacctccaaaacaggacaagatgagttaggaaggttttattaggtaagaagcctggaggaatgggtagactaggggctgtgtcactccctcagctgcctcctcaccctgtgtggttcaagctgagcctctgaccacagacctctgcccagagatcaagacctgactccgcctccccgacccagatgtgttaggccagtcactggggcagggggtcctctccactgtcac

SEQ ID NO: 1549 - DNA, 501 bp, Bos sp.
ctctcacggagctccagcacaaagctgctacagcccgtcttcacctgcttcgcaggatcaaggttggcgggcagcgttcctgtcctaattgctccctgcgactctccaggtttgtcatgggattacaggtttgtcagtttaagggctttagagccatcctctcagaaggcatactgcctccaagaaatataggaactgcttcatttagtaacagagccctctgcttggcagacagatcacacgctgattayaggaaccaaaagaaccagttcttctccaagcccaagttcaaatagcccctgtgttgagccccaaaaaacctaccatccacgaagcttataggcctctgggatgtcagggttcacaatgatggtgcttgaagataggacagagaggctccgtccaccaaaatcagaaactctggctcctttgatggccatcacgggttgtctagagccatcaaatttatcagcctgcgtaacaacagaaacaacaaacaaa

SEQ ID NO: 1550 - DNA, 501 bp, Bos sp.
attgagctttcaagtgcctctggccattttcaagtcatgccttctgttggcttcttgctgggaaggtgcttcttcttcttggtgtaatttgacctcgaagcaggggtttctgaagacaggtgttcttgagcagcagcaaagcctttaaggagaaccatgcagagtccttctgcacagaggctgggagaggagacttgatcattaattaatgaacaatatttgttgagcacttactggggccagaactatayatttaataggaggtagaggtttcaaaagcataaagacagttatggttagaattcgtcttctcctgtactgagctatctcagcatgtgtgagtgctcagtcacttcagtcatgtctgactctttgtgactctatggactgtaacctgccaggctcctctgtccatgggattctccaggcaagaatactggagtgggttgccatgcccttcttcaggggatcttcctaacccagggttcaaacccccatctc

SEQ ID NO: 1551 - DNA, 501 bp, Bos sp.
tctggttctttttccctgctggcttccctgcttgcccaacagctgtgttaaaaggtccatttttactgacgcatttgtagatgctgcctgtgttggatatgcaaataccatactctttctgtgctttgtttcattcccctatttacatgcaaaaactaggttcttttagttattggtgcttcatctgtcagtctctgaaagaccagtccttcttcatgtcttcctttcctcagagttttcctgtaggtttkttgcttacttttctttgttcaattttattttatttctctatttggctgtgctgagtcttcgtttctctagttgcagcgagtggggcctactctctagttgctgggctcaggcttctcattgcagtggcttctcctgttgcagagcgcaggctctaggtacatgggcttcagaagttgtggctcacgggcttagttgccctgtggtatgtgatcttcccaggccagggactgaatctatgtcccctacaag

SEQ ID NO: 1552 - DNA, 501 bp, Bos sp.
taaaagacttccatgaactcaagggtttctttgagctttaacaatccataattatacatatctaaatttcctatatagagtatatgaagagaattactttgggaaatgaggttcagaattatttaaaacagtaggataattatcaggtagcaatgatctgcttaaagaaaatgaagagaacaggaggaaaggtcatatgtagggtttgttagtaacaatggattattaacagagcaaaagttggcacaagsgatgatatgaaaatacaagaatgcagcagagaacacaaagaatattcagatgaattaatgaatttttcaaataatctcaatttaatattatctaattcaaagtacgacagacataaaggataaaatacacaggcttgtaatacacttttttccctttggaaataggaacagcaggggttaatcaatagaacagatgaatttaggatcaaagttcaatggtgtggggagggaggtgggaggggggttcagg

SEQ ID NO: 1553 - DNA, 501 bp, Bos sp.
aaagtcctctggcccttaaatttgcccctgcttcactccatcctccacaaagtcactagcaaaggatttctaaaattctaattcagtgaattcgctcttgaccaaagaccttcaagagaagccgattgtttacaggataaaacccagattctataacagagaatgagtctcttcacatcaggccccataagcatctgttacctgatgttctcctacatttaatcttatgaaactattcttcccagaatgartaatattgttcccttcaactccatgcctttgcaaaattctcttatttttaaagaatgctcttccctgtttgatctgcttagccaatacctactcattttttaagaccctgtgttatgctttctttgatcactcccaccttccccaagcttccttcccatgagttgactatgttcttgtgtcactatctctaacacatatccttatcaaatactgtaatacgattatgtactgacatcttgtctcccccac

SEQ ID NO: 1554 - DNA, 501 bp, Bos sp.
ggaaacctctgtgttccgtcggtggaaatgtaaatttgtgcagccactatggaaaatagtatggatgttcccgaagaaaaattgaaaatagaacttccatatgatctagcaattccactcctgagtacttatctgaaaaaaaaaaaaaaaaaaaaacccaaacactaatttgaaaagatacatgcacccccatctcattgccacatgacttagaaaagacaagatgtggaaacaaccaagatgtccactgmtggatgaatggataaagaactggtacatatgcacaatgaaatgttattcagtcataaaaatggatgaaagctagccatctataacaaaatggttggacctcaagggtccaacccattatgctgagtgaaataaaccaaagaaaaacaaacactgtaccacctttcacaagcaagatctaaaacaaaaaccccaaacagaaacaaaacaaacaagcccagagctacagaggactggctgttggttgtcaag

SEQ ID NO: 1555 - DNA, 501 bp, Bos sp.
tagccactgaaccaccaggaaggtcccttgaagttccttctaaccattttcattttcaagtttttagaaactgccttttactttccgtccagggtatttgtatatttaagagaagtttgcttccaaaagtcttatgctcaaattacacactagttttaagacgatacttacttcttggcctacactgggatgtatgaatgggaaataaaagtagtatgcatgtgataactgaatggtgggcaataggaagyctacatctcttttaaaattaaaatatatgttaactttccttttaattctgagaaattataacctttcagttcagttcagtcactcagtcatgtccaactctttgcgatcccgtggactgcagcatgccaggcttccctgtccatcaccaactcctggagtttactcaaactcatttccattgagttggtgatgccagccaaccatctcaccttctgtcatccccttctcctcctgccttcagtctttccc

SEQ ID NO: 1556 - DNA, 501 bp, Bos sp.; identical to SEQ ID NO: 24

SEQ ID NO: 1557 - DNA, 501 bp, Bos sp.
taagtttcctcagttgtcccccacatagtttgcatatctggtttgttcaaaacaagatccaggcaagaacatccctctttttctagaataattgcccctccccttcttcctcccaaacacactgatttgttgaagcggctggacctcttcctttgcatgtccacagtctggatttgccggatggtctccttacagtcctgctcagctggttcctctatcctctgattttcctgcatctggaactgaaaagraaccaaaggcttgattcgattacaattgaatatgtttggcaacagcacctcatgggggatgtggtgcccttcacgctgctcgtagcttcagaaccatacagctgatgccatcggacaacgcgcttctggtgtctttgacacctcctgcgtgcccctttccaatacccgccataccttttctgttatcctacatgctgtgttgactacttcctgtgttttctttagttttatcacgtaagtatgcatacct

SEQ ID NO: 1558 - DNA, 501 bp, Bos sp.
tcaaaattaattacatcatataggatttgaagagtggcagccagcccctccagaagtttctaggaactttaaacttaaagtagaagctttaaagtggaggctttaaacttaaacggttatgcacaggtcaggtccatggagtcaaatgactcctaacaacatcatgacctcatgagacttaatagacagaggccatttccttctagtgtggtgatcttaataaccgtaccaatatcttggctatatgtctrtaacttcgagttggttccttatgagtttgccacacaaaataagctctgtgcttgcaagaagagacttttgggaagacttttcatttattaaatcaacaaatctttgttacacatctactgtgtatcatgcattaacctaaaagccagacatgtgcttgggataggaccaacaccattgtgtctgcagaggttcacaaggaattcatcagcaaacacagacaatcctgagagggtggcttaaacaaatggg

SEQ ID NO: 1559 - DNA, 501 bp, Bos sp.
cagcctctatcccaggaggtggaatgaagaactgcttccgtcatgtgtagtggtttctgggaggagttcttacaaatgtggatttctgcatgtgctgttacactgggtcattttaatgccccaggtgccttagcatctcttatcagcgggcgcatggggcagctgaagtctggcttgtcccaccatcaggctccagtttcacccctggctttggttcagcctaatccgtgagccttccgagcacctctctraacactgccttcctaaggactggccttgtttctcttccagtctgaccttatgtgatcttaagaccttggtcctatctcctgaataaatctctccacgatgatctctccctttcagaagccaaatggcttgtctgaagcactccattgattgtgaccacagactgcctggtccatgctccatctttgctttgtgttattaatgttcttgtattactccatgtagccaacttgaaagttcctttagagtgtg

SEQ ID NO: 1560 - DNA, 501 bp, Bos sp.; identical to SEQ ID NO: 622

SEQ ID NO: 1561 - DNA, 501 bp, Bos sp.
taaagaaaaatgatatttgtttagataaatattattgaaatttgataaaacctctaaccctaaatcataaatcccttatgtacttgatcttctgtaaatagaactttagaacttaagaatcagaagactcacagattattcatttctaacctcttattcatctatttattcctgccttcaacaaatgactttgagtacctgccatgcgctaggcatcaaaaatatagaagtatatagaaaggacaagggcygtatcttcatggagtttccatttctggtggttgaaggaagggttcaacttataacacatagaatagtaaatagcgtgaggccctggaaacaaagcagggagggacagaattgtgatccaggcacacacgcggagcggggccgtctgtggaggagggacaggtgtgtgtgggcaacatgtgtgcttcaccctggaagacggaaggaggcccatgtgacaggactgtccgctgacgtgtgatgctggggtcc

SEQ ID NO: 1562 - DNA, 501 bp, Bos sp.
gaggggacttcccagttcagtctcccacacttcagttgtgtctgactgtatggactctagcctgtcaggctccactgtccatgggattctccaggcaggaatactggagtgggttgctgtgccctcctccagcggatcttcccaactcagggatggaacccacacctcttatgtctcttggctggcaggttctttaccatcagtgccacctgaaagcccttgtgttgaagacaagtactcaattacttctwaaaaaaaagtccaaaatcttctctttcctaatttaaccattaatatgcccaagactttcttccattatatgtaaataaaatgtctctctgccttggggtttctcacctgctgtgtttgcttgatttcagaggtatagaggtaggttaaccgccttcctgaccttgacttggttccttggtgttttatttcttatattttaaaatgtaattatgactgaagattaatctcagagtcgaaaccaaatatgta

SEQ ID NO: 1563 - DNA, 501 bp, Bos sp.
tgtccacccagtctctctttctccaatattgcacccatccaatctatccaattctttcaaactgaaatgctcatcaggcctctccctggtcccttcagtttggtttgcaaggccctccgtgataggatgccagcttagtatctggcctcatctccctcccctgacttccattccatatctttgatgggctattccttctcatgcctgtaagctgccacatgtgtcaatccttacatagggatttctacatktctacatagcacattttctactttttttttttcacctgaaaactcttatctatccctttttgtttactaaggacataatatgctacctcttcttggaagtccttgctaatatcattacctcgccccactatcaactggctaattcctctcctctgtatgtattgcacttaacgagttgtattttaactatttattcccccttaaactgtaagccatttgagaggaggactagttctatattctcagctcc

SEQ ID NO: 1564 - DNA, 101 bp, Bos sp.
ctgagttcatgctgaatgcattccagccaataatttatagcctttcccttraatcaagattgattttaaaattatagtttgtcttttgtcttaacagtttt

SEQ ID NO: 1565 - DNA, 501 bp, Bos sp.
ggaaaagaccctgatgctgggaaagattgaaggcaggaggagaaggggatgacaaaggatgagatggttgggtggcaacactgactcaatggacatgagtttgagtaaactctgggagttggtgatggacagggaggcctgacgtgctgcaatctatggggtcccaaagagtaggacatgactgagcaactgaactgaaattttttctttctaactgccccctatgttctgccaggccagcctcagaatayctccaagagcaaatggtaccaggtcttcatccaaagagaaaactttaaatctttaccaccaagagttgggtctctgagtacactactcattaaccaactcactctctcatatccacttgtagcacatggtgggagcttttctagtatcttcgccagttgacctccaagtgtgaataggagtatggggagaggttcagccccagaacccctaagctggtaaggagcaaaaaatacctccgtaaccatctgc

SEQ ID NO: 1566 - DNA, 501 bp, Bos sp.
gaaaccgatgtcaccaagaagcctataaaaggactgatggctgatgctctgtgagtgatgaggaggatttagaagagattggaggctccgggaactgaggctgtgggatactctaggctgggtgaggcatcagttttaccccacgtaccatgggaagcctatggagagttttcatttctgtgcggcgagggtaagcaaaacagcagggttggagtgcagctttagccagctcacttggatgctccctttgkggtgaaatgaaagaaaggaggctgggtgggatccacggagcccatcagaaacttacaggaacttggggagaggcactgatggcctgaccaggtggtcaggggagaaggccaagaagggatttgttctagcagcagagaaggcagtgagtgcaggtgacctggatatgggaagagaatcaccaagaataatgtcaaaatttggggtatctttgggggagtctagggagcaagtttattggaaagagcaact

SEQ ID NO: 1567 - DNA, 501 bp, Bos sp.
accccatggactatggcccaccagactcctctgttcatggtgattctccagacaagaatactggagtgggttgccatgccctcctccaggggatcttcccaactcaggtctcctgcattgcaggtggattatttaccatgtgagccaccagggaagcccaggaatactggagttggtagcctactggggacactttgcaacccagtaattgaaccaggatctcgtgcattgcaggatgattctttaccagstgacctactcaggaagccctcttaacacttaatactttgtactgcctactcccaaatctgtatatttcccacaaccaccccaccaccagtaaacactagtttgttctatttgtgagtctgcttctttaatgttatagtcactattttgctgcataggattaacttgttcttgatagtattatggagatagagaactgtctggaagatttagaactgtgaaagaaagcccttcattcccagaaaggccctt

SEQ ID NO: 1568 - DNA, 501 bp, Bos sp.
ccaggaccagcatctaccatttttcatgtgcgttcacaagcctttttgagtcggcctcgagtatgaacttaaagctagcaggataccaaataaagagaccttatatgcacacactggacctgtcatggccagccccccacccctaccccaagtgggtacaggacaaagaattatgaaactgtttggtaggaggaagttatccagtaggaagcattcctccagctcaggtttgagacaccagacctcagagkaaaggaactcatgtggtctgtaaaaactaacagaagactaaggtttagaaagagaatgaacaaggagactctaaaaattctcttctcctgggatgacctgttttaggacagaaacaatataccttccagtctgacccatttccaactgaaagtcatgccaaggttgaatcttaaaactgaatttataacctcttacagaatatttcacccctacctaggggtaggggcaaggaaacaatttttaatgaat

SEQ ID NO: 1569 - DNA, 501 bp, Bos sp.
tcttatgtgaaagaacaaacagctgtaaatatcctgctagaacatttatttttaaaattgtttcggaagcagtcattcttcctgtgcatgcaaagtaaaaaatcaaagcctgtgcctcttttatcattatgttcaagattatgttcattcatttattcattcactcatcctaccaatatttatttagctctgtgacatggtaggcagtaagtcaggtactgggaaaacagccatgaacaagcagaggtgayctgcagcaaatattacacaagtaactttaactgccactgtgacaagggagagggtctcaagctacagtgaaaactgtcagttcattacagtttgtcagtgaaaactgtacggagtgaggaaggatcttgggagggtgagagaatgctttcctggggcaaggccctcaggactgatagaagggtagggagaactggtcaaggggaagaggaaggagagagagcagtcaaggggataggtaggtggggagtg

SEQ ID NO: 1570 - DNA, 501 bp, Bos sp.
gagcttgcatggtggctcggatgctaaaaaatctgagtgcaatgcaggagacccgggttcggcccctgggtcatgaagatccctggagaagggaatggcaacccactccagtattcttgcctggagaaatctgagaatagaagaaactagcttcatccagtcagtggggtcaaaagagttggacaactgagcaaccagcacacacaagaagaatgaaaagccaacctcaaactgggagaaaatatagtcgracttgtaaagatttcaggattggtgttcggaatatgtaaagaactcatacaattgataagaaagagacaaacaacccaacagaaaaatgggcaagagacactcactctactcacaaaagaatgaatacaaatagcttacgacacaggaaaatatggtaaagtaatgagtagtcatgaaaatgaaaatttaaaccatagtgagatacctatttgcacctcttggattggtaaaaaggatggaaggcaatgt

SEQ ID NO: 1571 - DNA, 501 bp, Bos sp.
gcttctcaatcacaaagaacccaccagttcttgtagaaataatgagaagctgattacacttctacattaaacatggcattggttcctaaaatcaaattgctatgttacaatcaacttgtatggctttggcatggaaatagagacatgtgacctgctgtccacatcacagggcatgggaaaaggatgattccttcagaagaagtcataggcccagagaggaaattaaaccttaaggacatcattaaccaaaracctgcccacagactactattcccttcttggccatcaccctatgtcctagatgggaataaaggcaaagttgctttaatgagaggaccgaaaaatatatgtagtggcttaaaagaaatggaagtataccgacctcttacataacaggctggaagcaggagctccttgctgttggagcagctccacttcatccagctgatctcagggggccttggcctgcagtggcttgaagcaggatttcagttcccagac

SEQ ID NO: 1572 - DNA, 501 bp, Bos sp.; identical to SEQ ID NO: 653

SEQ ID NO: 1573 - DNA, 501 bp, Bos sp.
taaaattcaatgatttgatctggatagaggtttcatgaatgctcactttacaatccttagtaagcaaaatattttttattgtatgtgcttttttatatagtatgcctcacaatgaaaagtaaattctttaaacaaaataacactattgtcttcccaatcaaggggatcctgggttaatttggagactgccctaatatctgagcaccaagaagcgatgtatgcacaactaattgtacatcatctttctacarcttctctggcttttgtgatcacctcttttgtgatcaacaacacgtgtgctcagtcttgttcaactctgtgtccccatggactatagcctgccaggctcctctgcccatgaaattcttcaggcaagaatactggagtgggttgctgtgccctcctccaggccatcttcctgacccaggcattgaacccaggtctcttatgtctacctacattggcaggcagattctttaccactagcaccacctgggaacc

SEQ ID NO: 1574 - DNA, 501 bp, Bos sp.
tggatctagacccctgtttccatctcttctcccctgcctcaccctcaccagccacactagcctcctcactgttctgtggcctctgttccgtggccagaccagcctcagatctttccactcactgttccttctgactgcaacgatcttcccctagatatccatgatgtttactccctcaactcctttaagtctctgctcagatgctacctgctcaatgaggtgtttctcattgaccacattctgctcctgcrtccttcagcaccctacactgcttcatttttcttgagaactcagcaccttccaacgtattacagagtatacttattatatttattagtactgtctgtgtcctctcctctatagagacagattttactgtccattgtaaaatataaccatccttggcattcagtacatacttaatatacaagactggttgtatgaaaaacatacacacacagaacagccctgtctaatgttccaaagctctattattctggg

SEQ ID NO: 1575 - DNA, 501 bp, Bos sp.
gacgtgtctcccttttctcggatggcgggcagagagcagacatccagtgttgcacctttgcatccataacacactgtctgaggattttttttattaccctgtcgagacaaagagcaatgggctgcatttcaattcaagacccaacagactgcagtgctgagtctgaatccttcatggcagcctctgctctagctctgccagctgcccccaggttgtctatactgggtgtttccgttgccctccatccccaycttctctgtcttccatccagtgctgggcatcaggtgtacttagatgccagaagaaaagacggagatggtcaggtgtgggtccagactgccttagagctcaggaatgtctgagagtaaagagggctggagcaggtggggacatcttcctggaggtgatgggccttgataacaagatttagcaaggtcctgagctcacaatttacaaggctctcacatacagacagggtctcaatgaatcatcacaacaacc

SEQ ID NO: 1576 - DNA, 501 bp, Bos sp.
atattttagtaagttctttggatatacattgctttaaaattaaggtaaaatattttcagattttagcaccctcttttactatcatatatgctttaaaatcaaggtgaaatatttagataggtaaacctaagagattcacattgcacatttaggtgatattaacacagcagatattttggattcagagggccactctaagtgtttttctctctctccctcacctccttgcatctgttccctttctccctcgmagtttgctcctgatgcaaaatgcgattgttacttgcaattttagtttgagatatgaacatttggagttatgtgtttttgaaagaaaatgaaatgtagatgggtattttgtaccttcaaaataagaaacaaatagcactttctaatatgtttgaaaattgtttcagattcaaatttgttttgcagagtcaaacaagtgttgcttgtcatctttattgtattaattgtttggaaaatgagctaggctccgca

SEQ ID NO: 1577 - DNA, 501 bp, Bos sp.
tcaaaaactcaaacctctgaatccacaattacaagttggtaagagcatattgattttgtctatgaagttagccactttaaagcttccaaagttgccctctgacaaaggcaacatctggtctgccgaggactgtcccccagttgacctccaataacctaatattgctggatgctcagtcactcagggctttgctgagtttgttccacataaattctatgcagctcctaagagaaggctgagtttccagattsgtcaagagaaaaggaatctgccttcagaatgacaaatattcttttacctggagaaactgtcatcccagttatgcagtgacatccttagagctttattttcaaagcgaactttgagaacgcttggaagccaactctgtctgggagcgtgctctgccatctcctgatcctgcagttacattctgaattttccacatcttttgcattaaagaaacattattccctctaactctgtctgttggcctctttccag

SEQ ID NO: 1578 - DNA, 501 bp, Bos sp.
ctccccaggcaaaattctactgtgtggccttcttctccttcacagatccctcccagagcaactggtcctctcctagctggtagcatgtagatttttcttgcagctttggttgtatgagagagctccctccggtttccagttggttttctgtgagaattgctcacatgtagttgtatttttgatttgtttgtcggggtaggtgagttccaggtcctcctacctcactgtctccatcctcccttctagttctratctttaaacatactgataagaaggaaaatctttgtcacttttaattagaagtcttcttaaatattttgttcatgtacagtctgattttgcaggcttagttaataaatcctgctcgtgtgttgaatttgctaatttttttcccaaaaaagtgaataaactaatttgtaatatgataggtcaggaaactatctttagtgatatggcaaaatatgactcagctatccagtcctcataaaaaaggaagataaa

SEQ ID NO: 1579 - DNA, 501 bp, Bos sp.
agatttgtagtgcaatggggaaaggattttgatgtgggacaagccagaaactgatattggggtcatagtttcttacatcagtaattataggaacttcctataatttgagcattcagaaaatcatggccagggaagccctactaacaagcttggtagatagaaaacaaaatggcagcaagaggcacttggaagaacatgtgggtttccctttgttatagcaatatagtaatttatagaccttttctttcatytccctaaaaaaatgaatgaacatgtaataataaaacatagagtcaaggaaaaccctgtttcctttggattaatctctgtccttgcctacatgggcaccctcctgggaggaaaaccaagacttcaagtgtagcagtggcctcatttacaaggctgctgaggagatagaacactgtgaccccacggtagtgcttggtatctatttttggttttgtttcctcttctggattttatgtattacactgggatttt

SEQ ID NO: 1580 - DNA, 501 bp, Bos sp.
ctgatgtgcatacgtttgctcagttgttcagtcgtgttcaactctttgcaaccctgtggcctatagtccgccaggctcctctgtacgtgcaattttctaggcaagaatactggagcaggttgccatttcatactccaggggatctttctgactacttatactatctataaaatagatagttaatgagaacctaccatatagcacaggaaactctactcagtggtccatggtgatgtaaataagaaagaaaycaaaaaaaaaaaaaaaaagagcatatatgtgcacatatatgattcacatatatgaatcatacatagccgattcactttgctgcacaatagaaactagaacaacactgtaaagcaactatgctctaataaatactgggggaaaagaaaggaaagtaacagtgttgaataatatgggagaaagccatttgtgcctgtttctaattttaatagaaatagctttaatgttccaccatttacaataacgcttgtt

SEQ ID NO: 1581 - DNA, 501 bp, Bos sp.
attttgtatatcaattgctgtctaacaaactgcccaaagctctgttgcttagctaatagtcatcatttatttgttatgattctgtaatttgtgtagggcttaatggggaaatttgtctctattccgtgaccatttacttgggctggaatatccaagttgactttttcattcacaaacatgttgccttaactgcaagggctggagcataaggtgatacttgaactgagttttgaatgacaaatataaaggayagaagagagaggagaaagaaacatttttttaaagaagaaattatatatggaagactgaggaatagtatacaatataatgcattcagggaacttcatttaggtcaatggcatgaaggaaccagaagaagggtgccaaaaataagagtatatggttaattgtgggaactgaagctgcagaagtaagcagggatagatcagagagggtcatatttgttgtaccagaaagaatccaaagcagagggtgttgatg

SEQ ID NO: 1582 - DNA, 501 bp, Bos sp.; identical to SEQ ID NO: 731

SEQ ID NO: 1583 - DNA, 491 bp, Bos sp.
tggacaaagtcttggagcttcagcttcagcgctagtccttccaatgaatattcaggactgatttcctttagaatggactggttggatctccttgcagtccaagggactctcaagagtattctccagcatcacagatcaaaagcatcaattcttctgtgctcagctttgtttatagtccaactctcacatccatacatgaccactggaaaaccataggtttgactagatgcacctttattggcaaagtaatrtctctgcgttttaatatgctatgttatgttggtcataattatccttccaaggagtaagcgtcttttaatttcatggccgcagtcaccatcttcagtgattttggagcccgccccccgaaaaaatgaaatccgccactgtttctactgtttccccatctatttgccatgaagtgatgggactggataccatgatcttagttttctgaatgttgagctttagtcaactttttcactctcctc

SEQ ID NO: 1584 - DNA, 501 bp, Bos sp.
agatattggctatgttgtataatacatccttatatgtagcttattttatataaaatagtttaactcttaaccctctaccattataccgttaagcttttaacttgatcaagtccttctttatagttactgcttggctttttgtcattctttttgtggttgcttataaattcattttctcacattttcctgtgggttttcccttttttgtgtgtgcacaaaagcctatcaatgcaaacaaaagctttgttttrtatatttcaatatgaaatattctcatctacatgactttttctattgcttgcatttaaattttatgtctttgtacttaatattatttataggtctttattgattttaaattaggtaaagtttcttctctttttgtttttaaaaacattcaataatgtatttttcttaattgtgattatatataggtagataaattagaatacatattcagttcagttcagtggctcagtcgtgtccgactctttacgatcc

SEQ ID NO: 1585 - DNA, 501 bp, Bos sp.
caagaaagaagcaaaaagaaatgctagcaatcaaaaacactgtaacagaaaggaaggatatctttgacggctttattattagactagacacagctgaagaaagaatctctggccttggagatatctcagtagaagcctccaaaactgaaaaagcagagagagcaaagacagaaaaaaacaaaacaaaacaaaacaaaacacaacagaacagaatatctaagaactgtgagagagctaaggtgtaacatacmcattacaggaaatcatgggagactgttaggggattttgcccctctaatcatgatatgtgactatgacatctctatattcaagaaagtttcaaagtgagtggagggagaagctctgctcctttaggtctttgttaaaagaagaaatggacctggacccagcagagtcctcattctgggctctgcatcacttactcctcctctttccaatatttctcaaatcatagataattctcaaaaccatttcacttac

SEQ ID NO: 1586 - DNA, 501 bp, Bos sp.; identical to SEQ ID NO: 684

SEQ ID NO: 1587 - DNA, 501 bp, Bos sp.
gagattatagaaatgctgtggtttaaaaaaaaaaaaaaaagccactagcctgcattttcgtactgtttttacacctgtggggaattggaagttttgaaggtacactgggaaaagaaaaaccaagaggaaaacgtgttttggaaaaacaaacctggctgggaagttaggtttctgccttttcttacaatattctttaaaaaaataaaaattccctcacttagctcagaatttcttagattctctcgtgtctktgatgcaaaggattggctacattattttttcaggcccctcccagactcatgattcaggaggactgtatatccccaaacgtattgttgtaggacttatttcagagccacttctgttttcttcttgcttctcttagaattcagtacctttttgaaggtgatgatcctttagggtagtcttaacccacgagaaccaatcatacaggtgaagatagttgtttcacactcctcacattttccttgtatgaatctt

SEQ ID NO: 1588 - DNA, 446 bp, Bos sp.
atctgcatgccctctggcagattctagattccaggagctgctggtcatggtcctgcctcgaggaggacccctaggcttgtgaagggatgttgaaggctgacttgcccctggagactcattaggggtcaaagtgtcgttggaagttgggacagttggtgggatctgggaaaagaaaacacctgaaggggcagccttgagagacgtggccctagtgacggccagagcgccagagcggggtgcagctcagataygatccctgtttgcctagagccttccagaaaggaagcgcaagagtcagggctcaggcacctaactctgggaagaccgtgtggcctactggttaatagcatgagttaagtggaaaattctgcaagagacgggaataccagaccacctgatctgcctcttgagaaatttgtatgcaggtcaggaagcaacagttagaa

SEQ ID NO: 1589 - DNA, 501 bp, Bos sp.
tctttagttttcttctttcccatatgtagtataattccaatttgttaaaatatgtttgttgtaattcatttgcaaagatttttatataatgacgtggggggttggaaatgggagctgccttctcaaagctgcaagcattgtctttaaaagactgagatttcaattcacttttaaggaaaactgttactttgttttacgaatgatcacctaagggggccctttgtgttgttgttcagtcgctgagtcaggtyggattctttgcaaccccatgaactgcagcatggcttccctgtccttcactatctccctgagtttactcaaactcatgtccattgagccagtgatgccatccaaccatctcatcctctgtcctctgttgtccccttcgcctcccaccttcagtctttccctgcatcaaggtctttttcaaagagtcttcacatcaagtggccaaagtattagagcttcagcatcagtccttccaatgaatattcagggttg

SEQ ID NO: 1590 - DNA, 501 bp, Bos sp.
aagaaaaagctaaatcacggtaagcatttcaatgattaggcgttcaatcacttaaaggtgtcgtccatcctgggaggatgacaacggaaatgactttggacagaaagaaaactgtgaaatctaatagaaataaaagcatctccagcttacatgaggcctggagaagtcagcataatttatccctggcctcaggcagaattaccataaaccatctgacatagatatattttgccatgttaaatgactttcaraaaaggaaggttttccataattttccctagtaactcattgttgtgtttaatagcatcactgtcaagaagcaatttctcatgctgtatctaacttgtgattctatagctttgaattcatgtccactttcatttcatcgggttgtgcatagctgcttccggccactgcaagatatacttaaccaaagtatagcctgacttgcaactttcaccccctaaaccaaatacagtctctttgatttttaaatacagt

SEQ ID NO: 1591 - DNA, 502 bp, Bos sp.
  misc_feature (1)..(16): Nucleotide uncertain from position 1 to 16
nnnnnnnnnnnnnnnnctcgctgaccagaaggccagcagagctggagagagtcgctgggtattggtcacaaacaccacgcaaaagttattctgaattaatttgatatacaaaaggagagtttaaaaaagaaacaaccattctatagccagaatggtgaaaacacacaggggtagtgactcaatcttttcattaatcatgtagcagaatggaacttgcagcactgtttagaatacatctgaaattttgtctatgaagaaccagggcaagagagaagataataaagagtttatcacaacaatgtgatgtatagttttcttgacacttggttggtcctatgtgacccttgaaactgtcctttgagatatttagggcagcacttaggctaaattatttgctcaaaagtcatgtgaatagtgatagaacgcagaactcaatgctggttccggaaacctctagtaggtctcttcacgtggaatgcagtaatgatagggacttcactga

SEQ ID NO: 1592 - DNA, 501 bp, Bos sp.
agaagcagtaatgtgaaagactgagtcttgtaagctgactctgaaaagagcaaaagaaagaagaatcatcaaaaatattttttatcttaccaaaaaatgatcaaatatatcaaaatgcccctgagtgattaaagaatgtttgtattattagcagtatattttgttttgtgttggggaggggtcatagccactatcagtttgaaaggatttccttcaaaattcctgaaatgcaactgaaaaggcacgcttcrtttatttaagaaatttacttagcttggatctctttaaaatgtaatgtaaataatctattatcttcccctttaccacagttttattatacatggattataaaaaaagatatcatgattttaatattctttttcctgccttatgcagacatttttaaggtggacataatttttgcatccatcccagtgctgcatgttttattttaacaaatatatgagcctcagcgtcagaacattttgtatgtaatcatta

SEQ ID NO: 1593 - DNA, 501 bp, Bos sp.; identical to SEQ ID NO: 297

SEQ ID NO: 1594 - DNA, 501 bp, Bos sp.
aactggaaccctgaataattcgccaagattggagatcctctgctgccctgaatcctagcgacctaggatgcaagtgaatgactatgtcccaaacacagacattggtgaacagcctagtgcttccgcagacttatcagagtttgtggcgtggctgaggggagtcagcctcccagggaggctgtggactggaggccttggcttctcaccacagcgacatttccactgggctctttcagtgccctcacaatgtragggctgactttcctccagtgagattcaagacaaaggaggagggcatctggactcggaagtcacatgcttccatttcgccatcatcctttgggttccacagcccactctctactcagtgtgacgccaggagatgacactcactggagtcctcttggaggctggccaccagagtcacattctaggggagaagctgagtctctagggcagatgtggcaggaatcatggatggaaaagcagcttggagctagg

SEQ ID NO: 1595 - DNA, 501 bp, Bos sp.
acatagtaagagagttttgcattaaaaatttttttttctgaataagggaattccttgtgattttttttttttttcaaaatgttccaatgtataaagatcctgtgtagaaaacgggggcttaacgtgggtgacctgtcatttcagcccttggtgatcctcttgaaaggttctgaggcatacagtgttcatattcctttgggttttgccttccacccacctgctctgacagacctttaattttggaccgctgyggttgaagcccgtggatgcacagtccccaaagccagcactaacttgtttgctttggagaggcctgacgaaaataggctgcttttcaacgcaaatagctcattttcttctgttggtgggcagttcatttaagaatagctttttatgtattgtattgtaaaaataacctcttggagaagaatgaatgcctccaagtgactctcccagactggcttttcttccctatagaaatgactactttgatttagttta

SEQ ID NO: 1596 - DNA, 501 bp, Bos sp.
tgagatctgtgtaaatatatccttgacttaggagactacaggaaaagatatagagtcaaattcagaaagtcacttatgattggatttccttcaagaatgcagatgtactatgctaatgtcaagtgagtcataagacatctacctattcattggcaagaaaactatataaccactacttctatggctacaactccccacaaagcacaattctgctcccaaaccctctgaagttctggatataaatgtaaaayataaatataaaatgttcattgaaagttaaaattcaaagcatctgaactgtactcaataaagacttcaaatatatattgaaatgttgaatatatacatcagtattttatttgcctagattttattcagtacaacattatgcaaaacttctgaaagatcaagacattagcctgaacattgggccctcctagacaaactgggcttatctttccatctcctaatttagttatatctgcaaaatcccttttacta

SEQ ID NO: 1597 - DNA, 501 bp, Bos sp.
ccaggttggatattacaagttggaatcagcctgcagatccccataaggagatagtcaagttttcggatctgggggcttttagaggctttaaggggaagagacagggtcactcttccttcttcctgtcctcttgtttctgtactcattcacatatttagtaaacattcatcagtactatattaagcataaaggtaagcccagcaaagaggacgaaggataagacacagttgctgctctcagtaacatccagygtggttggggagcaaacacataaagtaagagaccagaccagtgacagattttattttcttgggctccaaaattattatggacagtgactgcagccgtgaaattaaaagatgcttgccccttggaagaaaagctctgacaaacctagacagtgtattaaaaagcagagacatcactttgccgacaaaggcctatatagtcaaagctattgtttttccagcagtcatgtcactactgagaagtagtcaagaa

SEQ ID NO: 1598 - DNA, 501 bp, Bos sp.; identical to SEQ ID NO: 413

SEQ ID NO: 1599 - DNA, 501 bp, Bos sp.
tcagccttctatatagttcaagtctcacatctgtacatgactactagaaaaaccatagctttgactatatggacctttgttggcaaagtgatgtctctgcttcttaatatgctgtctggatttgtcatagttttccttccaaggagcaagcatcctttaattttgtggctgtagtcaatgtccacattgattttggactccaagaaaataaaatctggccacatcacaaatggcatgggggtgatctttgrtgagaggagtcaaaggtccacttgggaactagaagatacaactttaatgacacatattctatttgaccagttaaaacctgcataatgcagaatgtcttctcccgtgggactaattcagaaatatgcccatggacaagatggatcaaaatggactgacttacctttccctcatccctaaacacacacacacaacccaggtataccccgacactgacagatatcagagacaggctggagagtgtgtgctgag

SEQ ID NO: 1600 - DNA, 501 bp, Bos sp.
cgactgtctacttagggcatgatgtgaaaggcagagggtctccatggcagcattgaaaaaggcttaattttttgcaggtgcaaggcagactgttgaagatcaggtgcaagacttgatttgtaagaatgatagagttatgaaggaagctgaatttatagttctgcaagtgttagggccccacagggaaggagtgggaccctgagaacaggaatgtggaaatctgggtgtatctccttgagaacacccaaacytcaggtcccttttgggtctgtggaatggcaggagaagccgcttttccatggacagagggggttttccattatctggagaccatgcaaagccctgagttcagatagactcattgcaaggtgatctcctcctcaggatctgacttgtttcccttcattgtcttgagaagagctggaagtgtgttggaccaagtaaaaaatttatcattggattatttctgcctttttctgtacacagttgtgtgcatggtca

SEQ ID NO: 1601 - DNA, 501 bp, Bos sp.
agcttaaaaacaattacagacagcaccatgactaatgaatactgcacagttttctttgtcagaaaaatgaatccactttgctgttcatccttagccttgacatagtgatatatagcttgtttcctgaagtagatttaatggtgtagattattttgcagacttgaaaatagcatggaaaatcagtatattgcttcatgtcatactgacatggctttatgtcttgccaccaaagcagaattggagcattagaktatagtcaaaatatggaaatgcttgactctttgatttttgtctctatggttaagtgcagttgggtagggtgtgagggggggtaaatggaaaacaatcaatataattactggagttctaattattcttaggaaaaggaaaatcttttaaacaaaacaagctgaagacggttttaaaagtaaaaaaatattgaaatcatagctgtcactttaaagcatctttttttaggagaggataatcaatgaattcata

SEQ ID NO: 1602 - DNA, 501 bp, Bos sp.
gacgctcaatgattcgtaatctatcctctgaggtcatcaattttctagtaataaatgaaaatgtagaccgttcccatctttcactaacttaaatcctggtactatctttgatcaatgatatttaatttagatctccattttcagtcttattacccttttgtgcatttactttcaacaactcatccaagacacatacaaactgaatgttctaagagttctgaaaaacttctggtaatttctaagaggcaggmctctgcagtgaccgggattcagtaagactcatttaacagcacagtggactcacacaattcacctttcctaacagtatttacatctttagaggtaatcgcttccctagttatggataaatatacagccaccatgaaatccttcatccattctaatccacctcccactgtacaaatgcaggcaaacaaactcccactcttaaaagactaatcaacccccactaaaaaggctttctcttttcctagctgtaag

SEQ ID NO: 1603 - DNA, 501 bp, Bos sp.; identical to SEQ ID NO: 390

SEQ ID NO: 1604 - DNA, 501 bp, Bos sp.
gagtcattagattccagaaaattccctgttcgtcccatccctaaatttgatttcctgagagccagagagaaaacaagttattccgagctttatgacaagtgaatgtgtgggtgaaacaggaacctgcagtcaccttggtgctgctggaccttgtcccctgatcctgttgaaaggagccaagctccaggtggaactgcagctcgggcttgctgatatagcacgagtggagttttccataggaaattaaccargtaacactcacattctttcccttctctcctttccactcttctcttccctctttaatgaaacagcttaagctcagcacttgaactctctcacaggggtgaagtgtttgacaatttcaatctcttctgacactctgatcaaaaagaacagtctcttcttcacttgcttattccaaaaagtgcttttcatcaaagctattgtatttcactgaagatgcaactttctgaaaacaagatattttaaaatgatagt

SEQ ID NO: 1605 - DNA, 101 bp, Bos sp.
ctcttgttcctgagaactccagtgcctcctctgagcctagcttgtgagatrgaacagcagaagttgttcagactgtacagcctttgtacacaagcatggac

SEQ ID NO: 1606 - DNA, 501 bp, Bos sp.
gataaaaccattataaattttacatacaccagccatccttcaagactaggacagagctatttgggaaaggaggcattctgtattcattaaggcacacttccaatttattgctggtggggaaagaagaaagtgacatctttctctcttagttatttctaattcccataaaaaacagagagtactgcagactgggtggcttgaacaacagcattcattattggttctggagactgagaagtccaagattaacrtactggctggttcagatcctggtaagagctgtcttcatcacttgcacatggccaccctcttgctctgtccttgcatggcttttctttgctgcctgcatttggggcaccatttgcggtaccttctaggaaggccactaatcctatttgactaggaccccaccttcgtgaactcatataacctttacttagctcctaaaacaatcacttgggggtttggacatccaacatatgaattttttaaaatttaaat

SEQ ID NO: 1607 - DNA, 501 bp, Bos sp.
tcctccaggggatcttccggactcagagatcaaacccaggtctcatgtttcctgtattgtcaggaggtttttgtaccactagtgccacttggaagctgattatccttaaacagtttattcagagaagatatactagtagatatctgaatattgaaacagtttttctccactgttttatacttttcacaaaaagtgactctttactattttctcccaatttctctgctttcgtttgatacctcttgggaaawaacaagtttgaactaatttcttatggacacataatatcctgactattccttggaaataaccagatatactcttgatataatagcaaacccacatgcagagtaaagtattttccatggcctgttaaagtgagaaagtgaaaatcgctcagtcatctctgactctttgcaactccatggactgtagcctgccaggctcctctgtccatggaattctccagaatattggaatgggtagcctatcccttctcca

SEQ ID NO: 1608 - DNA, 501 bp, Bos sp.
gatgggtttggaaacactggaaacattcccaccccaggaatttccaggacagctggtaagtcaacaacattatcacaaacattatggccaaccatgtcagttcttgcaacaatgtattcattttccaaatgttccagctgagaaacccacatagaacattccccccatctagcagatggctaatggggaagccggtattttctgtggaaaccaaagtttcttttaacattagacgttttcagcagagagarcaaataatcatttgtttttctattctatcacatccataaagagaatgtatttcaaactattaattttaaaagtgcataagaaagtgaggttttccttaggaatacagagctcagaggtttttcaatcttgaaatgctggtggtggggataagcctgagatggaggaattaggggaaacttgagcttttctgtattattattgtttttgttaatttgtggggggaaatcttttaaaggatgtgggtggaaa

SEQ ID NO: 1609 - DNA, 501 bp, Bos sp.; identical to SEQ ID NO: 321

SEQ ID NO: 1610 - DNA, 501 bp, Bos sp.
aaccataattggaatgctccttcattcttaatctcccccacttggcatacactaccagttctgggagtctgacaaaatgggggatgtgatggtgctctcacatgaagtggttagctactggacaactggtagctcaaaaccttgtttggcaattgaataaagtcacactagctgggctaatcaagagcaatattatgaagtggtgaaatgtaacttaagggttttctattcctttcctgattttagttttsactacaattattaaggttgattactaaggctcctaccattactaaaaatgtatgattagcacacagttgctattacctactgcggttataaatattagaagtagttgaggttagctttcttctatattgtgtttgatcataacacagaattatatgcagatgtatccaaagtcttgctggtttttcgctcatgtagcaaaacctactgtttacaatggtcagagcatattctactcatgcttatgctgtt

SEQ ID NO: 1611 - DNA, 501 bp, Bos sp.
aaaacctaagattgcttttaaagcaataaggacatttattccataactgaaggcagctgatagataattttaaggttggttagttcagtgactgttttagtcagttagggccaccgtaacaaaataccgtagactaggcaatttagacaacagaaattcattttctcacagttctggaggctggaaattcaggatcaatatgttggcaggtttggtttctccggaggcctctctccttggcttgttgatgrccatcttctcatggtgtctgcatgcggccttccgtctgtgcttgactccccaccagtcagattggagtagggctcactcacatgacttcatttaaaccttaattgccttccaaaaggtggtatctccaaatacagtcccattgggagttagggcttcaacctatgaatttggggaggacgtggttcagtccctcatagtgactcagtaatgtcagatctctgggttggcatctccgtggttctcttgttt

SEQ ID NO: 1612 - DNA, 501 bp, Bos sp.
ttttgagctgtatataaatattgaatcagtgagatatatgtcttaaaccaatatgatatataacaatcatactttaataaaaatatcttcatcttttcaaaaacaaaggagaatagtttaaaaagtagcttttgtttcctagaaagtttcaaagacttaaaatatgtctctgtgattttgaaataacatgtaatataagggtgctatctttaatattaaaagaaagatgtatatttaccttccacaattaytgtctatatacaaggataagtatagaaaaacaaaatcaccagcaaacaggtttattgtttttatttatacattgcatggttcatatcactgtctttctggctaatcaaagaaaatatctaggagattcaagagacatgtactggatggggactatgtacggactgctctaagagatgcctggggatgtacagatgaaacgaacaaagatcttgatctgaggagcccattcttacgggagatagccatgta

SEQ ID NO: 1613 - DNA, 501 bp, Bos sp.
catagtggctctatcagtttacattctcaccaatagtgcaagctagctaagtcacttcagctgtgtccgactctttgtgaccccatggactgtagcccaccaggctcctctgtccgtgggattccccaggcaagaacactggagtgggttgccatatccttctccccagtagtgcaagagggttcccttttctccacaccctctccagcatttattgtttgtagatttttcaatgatggccattctaacckgtgtgaggtaatctcatggcaaacttgagaggtacttattatcttcatttaagttgaggaaattgaggatcagtgactcgtccaaggttacacatctggttaataacagagtgaggatgtgaggctgagtcagactggctccaaagcccatgggcttccctgcacttgcatcaagttccagcgcacatttccattttaacttgcacgcagatattcacgcacacttacacacagactatagactgctaat

SEQ ID NO: 1614 - DNA, 501 bp, Bos sp.
agaactaagcctccaagcttcaaggaggtttcttacaaaagtcgtcgggagtggctttcttgctcagtcctgccaagagtttcaaatcgtgcaacaaaatatattctccagttgacagttgtgtacatcatagctctccagtgggaggtgaattttcttccccatgtgaaagttacttcacctaaaatatggtatttgatgtatttatcttctaaaattagataaaaccattataaattttacatacaccrgccatccttcaagactaggacagagctatttgggaaaggaggcattctgtattcattaaggcacacttccaatttattgctggtggggaaagaagaaagtgacatctttctctcttagttatttctaattcccataaaaaacagagagtactgcagactgggtggcttgaacaacagcattcattattggttctggagactgagaagtccaagattaacatactggctggttcagatcctggtaagagct

SEQ ID NO: 1615 - DNA, 501 bp, Bos sp.
ttcctgatcatggtttctattgtgagattataatacacagaagctcatcaggggatccatatattacctgcagaaagacctccttggcacttttaggcattgtgagtataactgggtgtttggtgcaggatgcataatcactcattttttggtcttttttcaggctgtgggatgacgggattatcgatccagtggacaccaggctggtcctgggcctcagtcttagtgccgccctcaacgcacccatccakaaaactaacttcggcatcttgaggatgtgattggaatataaagcatcttctattggacgtgtactgaaatttaatatatttgtagccttaaaattttagactttttcaacatgtcgctattaatagtaaaagtgttttcttaacacagtgcattgtacttttctacctttaaacaaaaatcagtgaagatatttatctgatgaagtgtcattccttgtaaattctcttagaaaaagctttctgtggctca

SEQ ID NO: 1616 - DNA, 501 bp, Bos sp.
taggcaagaatactggagtgggttgccatttcctcttccaggggatctccctgaccctgggattgaacctgcatctcttgtgtctcctgcattggcaggtggattctttaccactgagccacctaggaagctccctctagaagggtacaaacagctttaaaaattccaggtgggagaggaaggaacaaagatgaactcttccttttgcaactttaatatgtaacaactacaaggtaaacgcatcttaccayaatcaatattgtctatcatttagtgttaatgtggtatgtatatattctacaagagtccctgttttccttttccaaccatcctaggggctcccctctgctctcccagatggactgcacagaaggtaacattgtggcatcctgctctaagaaaaagataatcctggggttcaggaattatagaaaatcaatatatagataaaggtgcatatattgagcatatttcatataatcaattagtagataggtgaga

SEQ ID NO: 1617 - DNA, 465 bp, Bos sp.
acatatttaaataaacctttcagttgatgtcagaagatcatttggcttcactctacctctattaaagttgtgaatccttggtcaagtcacttagagtattttgacccccccccgtttgtgtatttgtcaattaggaattgttgtgagtgttaataaaataatatatgaaaggagtctatatcaatagaatactttaaaaatacataatattgtcttgaagagaataataattatttacattatagaattaycaagagatcaaaatctgattatatataaatgcttggatagtcttaagcagtacacaaatttaagtctttaatatgaaaaagtatcagctataagttcactaagctattatttttaaaaattgctgttgtataataattctttagttttagataacctatacccaatatcagtttgagactctgactttatatgtatattttatagagatcagaa

SEQ ID NO: 1618 - DNA, 501 bp, Bos sp.
tccaggctggtgtctggtgtttgtgctgcttcttttctttttttttaattttatttaatttttaaactttacataattgtattagtgtgctgcttcttttcaaaccctctttcctgtttattctcaggatggtcacaggatgctgcttcagggacccatggaggtaacactaaatgggaattttctgattcatcctccacagaccctccaaagacacatgtgacccatcacccatctctgaccatgaggtycccctgaggtgctggaccctgggcttctaccctgaagagatctcactgacctggcagcgtgacacggaggaccagacccaggacatggagcttgtagagaccaggcctacagggaatggaaccttcaagacgtgggcggccctagtggtcccttctggagaggagaagagatacatgtgccatgtgcagcacaagggacttcaggagaccctcacgctgagatggggtagggaggaggctggggtggagc

SEQ ID NO: 1619 - DNA, 501 bp, Bos sp.
cgactctgtgagaccccatagacagcagcccaccaggctcccccgttcctgggattctccaggcaagaacactggagtgggttgccatttccttctccaatgcatgaaagtgaaaagtgaaagtgaaattgctcagtcgtgtccaaccctcagcgaccccatggactgcagcccaccaggctcctctgtccatgggattttccaggcaagagtactggagtggggtgccattgccttctccgtgttcatartaggcaattcataaatccttgttatcttatatgctgggcttccatagaattttcccttacccaggtagatatgttatcaacaaatcctttatttggcaactatgaaagtgtatttcaccaaacacacttgtgattttccaagcacttatgtaaattatgtagttattttatgtttaattgtgataaaaacatacaacacaaaatttatcatcctaatcatgtttaagtgtgcagttcagcagagcaaaat

SEQ ID NO: 1620 - DNA, 501 bp, Bos sp.
ttctttccttcatcatgttctctttccaccttgtatcatactgtggctgaagtactctttacagggcaactttctgggtaagatgagatcatttagaacctatttaatttgaggtgtccatgggtcatccaagtctttctgtagcaggaagcagcatatgcatttttttaaccccaagggagagagctcaggcagttagggaatcaacagactttctgcatctggtgattaaaccttaagcaagagtgggrttgctcaaaaagtctttaaagaaaaacatcggctgctgcttctgctgagaccacttcttaggtcacctcatttgcctaattaactccttatccttcaggagtcatttcagcctttgatccctctggaaagggaggctctttcatggtactcctccacggctttggtttgtcgttgttgttcagttgctaggttgggtctgactctttgtgaccccatggactgcagtgggccaggcttctctgtctttca

SEQ ID NO: 1621 - DNA, 101 bp, Bos sp.
gtaatctgtccctagtatagagggtggttctttgtttacctgaagaaaaaraatatgatttgcttttctgaagactgttttttcccttgattttttcttac

SEQ ID NO: 1622 - DNA, 501 bp, Bos sp.
ggcaccctgactcccagcacaggcttccctctagttagcttctggccttgcaaagtgtataccagacaagatatctcacaactgatgatgcacatcttgtgattgacagactgtgggtgttggtcctgccctctgtagtgttaccttggaaaagtatgtgtgacagtcaccaagcaccaccagcatccacggtcaggcaccagctgcccactcagtacctctcaaatggaagcagtggaggaatgggttcyccaaggagttgtccacccagtctctctttctccaatattgcacccatccaatctatccaattctttcaaactgaaatgctcatcaggcctctccctggtcccttcagtttggtttgcaaggccctccgtgataggatgccagcttagtatctggcctcatctccctcccctgacttccattccatatctttgatgggctattccttctcatgcctgtaagctgccacatgtgtcaatccttacataggga

SEQ ID NO: 1623 - DNA, 501 bp, Bos sp.
  misc_feature (488)..(501): Nucleotide uncertain from position 488 to 501
tgcgtgctcagtccactaagtcatgtccaactctttgcaacaccatggattgtagccccccacgctcctctgtttacagaatttcccaaggcaagaatactgggatgggttgtcatttcctcctccaggggatcttcccaacccagggatcaaacccatgtatcctgcattggcaggtgtggttgtttgtttgttttaccatggagccaccagggaaatccataagagattagcttctcctttattcatasaaaatgatggccaagggaatacatttgaattccaataaatctgagtcaaatccttagttgagtgatttcaggccatttacttagctgtttagggcctcatttgcagatggaaataagaatcctatgtatgtgtgtgtatgtgtgcgtgcgtgcatgcgtacgctcatgctcagccctgtcatactcagggcagccccatggactatagcctccaagctactctgtccttgggatttnnnnnnnnnnnnnn

SEQ ID NO: 1624 - DNA, 501 bp, Bos sp.
  misc_feature (401)..(450): Nucleotide uncertain from position 401 to 450
actggaatgggttgtcatttccttctccaatgcatgaaagtgaaaaatgaaagtgaagtcgctcagtcgtgtccgactcttcgcgatcccatggactgcagcctaccaggctcttccgcccatgggattctccaggtaagagtactggagtggggtgccatcgccttctccattaaagtaatataaaggactataatcataaatagtagttttctcttccattgactttctatgtaccatgttttaatgaygttgtgctagagtctaccattttataattttcaaatagtcatattacaaaacttacaacatgtaactatttttatggatatctatattatatagttaaaattaacatgtatattaataaaatatataaatgttggatagttttctcaatnnnnnnnnnnnnnnnnnnnnnnnnnnnnnnnnnnnnnnnnnnnnnnnnnnaatttttgtctctgccagttacataggcttccttcttgtatggaataatgt

SEQ ID NO: 1625 - DNA, 501 bp, Bos sp.
tcattcctatttaattttgtttctattattgccttccctatgtttcatatgatctcctttttataattaaagacattaccataattatacaattaagtttgctcaataagcaaaaccaaatattgtgttaagcagactaagtctgcttaatacaatattttaattattttcatttaaagtaataacctgttatgttcaatctatgtttcatcagtaaagcgatgacaatgttaaggttttcatcaaatgtwcggattagaaggtaatttcaccaaggccagcaaaagatactaagtgcttgaaagcttatcatctccccaaattttaacacttcactaaatttttctttctggcaattaaatttacaagcctttgaatatgaaggagctggtaagagaccccagaagacatcaattagcatttaccacagaaggagaggacctaactctgagtgctaataaatgagtatgtttgagaagggaaagggtcaaagtaccatca

SEQ ID NO: 1626 - DNA, 501 bp, Bos sp.
ctttcccagagtctcctctccccctccacccaggcatgtgcctgtcgaaggcaggaactttgtctcatttggttgtggttccagacagttgtctgcagacagttggcactcagcacatcgcacaggtgatgctggagtgacaagcacccagctcttggaatcagaggatctaggtcttgtcctggccccctctgtggatctgcataatttacccgctgagagagcgttctgatgcaggtggttctcagackctctttgatcaactccagtccaggttgactttgaggcaggccctttccttttaattgaaggatagttgatttacaatattgtgttagtttctggtgtacagcagagtgattcagatatatatgtgtatttctttctcgcgatcttttctattatagagtattacaagctactgagtacagttccctgtgctgtacagcaggaccttgttgtttatctattttatgtatagtagtttgtacctgctaatcc

SEQ ID NO: 1627 - DNA, 501 bp, Bos sp.
ccagtaactggtttagcggagggaacttaacagtttccttcaataaggcataagaagacatctgctaagtacctcaagaagaagcttttctctctgattaatgagacataaaggaaaaaccttgccccttctcctgcctttatacttggttgtatgaggaagtgactccgggaacctgatgcagggacgatgcattcatgggagggaaaaaatgaagatggaagagaagctgatctcctggtgttcttgastctctatatcaacgcagaaactacctcttctagacatcctgttatataagaactattcttaagccctgaccaattaagccattttctatgtcttgttttgatacccgccaccaaaagcttccctggtggctcagaggttaaagtgtctgcctccaatgcgggagacctgggttcaatccctgggtcgggaagatcccctggagaaggaaatggcaccccacttcagtattcttgcctggagaatcccatg

SEQ ID NO: 1628 - DNA, 79 bp, Bos sp.
attcaaaagccaaataaaccctcatggarttcagctcaaggtttgaagacttcctagcttgtcctatggacctcaacac

SEQ ID NO: 1629 - DNA, 501 bp, Bos sp.
ctcttttttccaccaggaagtagggacgaaatacactgtcttactatgcataccaagaagtcctcatttattttgcatgcatttcccctgaggacaattcaaaacattccccttgaaaagtcactgtggtttgaactaaactttttttcttttttttccaataaagagaatttgctgatggtggtgctgaatcagtggactcctgcttagtaatggatgtttgtgtaattttccttgataaaatatatgaytgtgaaatgttcagaataagggagaaaagtcatatacactaatatagtctagattatattagacacagtaatacttgtaccagaatatccgtgcttctagtatatagtatttgttgcaaacagaaaaaataaaggacaagaaaatgaaaataacaacaacaaaaaatgagaaaataaaaagaatgaggaaaaaaataaagtgatgatgagaaaataagtgttaatgaacttatctcattgctttcagggg

SEQ ID NO: 1630 - DNA, 501 bp, Bos sp.
ttcagttctcaagtgtgagttttatatcagtcccctggaaacagtttgtatcctccaataaatttttacagttgattcacctgcctgatacccctcagccatttccttcagaagctgtcaaacccgccaacgataatatatggcccgaccaacaagaacagctgtagtcattctctctgcaggttctcgcaccctgttctgcataaaataatacatcaagattaattgatttcccgtcagtctcacagaayagaaaattaattttcatgtagctattttccccagcatatgaattttgtacatggcaagtaatttaagtttttaattattcatgagcgaggagggagtgggggggaaacatgagaaagtgagctttgccgaacccccaaggccagtccctgggcctgggtttgtgctgaggcaacaatagcattcgctaatgcccatataaataatatatgtattaacatatatcttagtacaacaccaatttctctcact

SEQ ID NO: 1631 - DNA, 501 bp, Bos sp.
gtatgctgttagtgatgatccttttaataaactgttctatacaactttgtctttctgatttaataattgatcatttgcttattagtttacacgtttgcacacacagcttttaatgtacatatcagtaattacaccctaactactctgccagtgatctgaatcgtttctgaatatatttgtgcatatcaggcattctgtcattttcatcttgctgaggaaagtgtctttggggaccttctgatctgctgctrtgtgcagtgctatgttagccctatgtaagctagaggtgtggttcttgtccacagagctccctttactagtcttctgaggattctgttctgtattgcagttcctatttacttttctttggtttagctccttcgttggcctcttctagtagttttgtgaggaaaaggagtatgtatatatatatatttttaaaccttgtatgtttgcaaatgtatttataatctgctctcacattggaatcatagtctgatt

SEQ ID NO: 1632 - DNA, 3600 bp, Bos sp.
  polymorphism (3401)..(3401): C/T polymorphism at position 3401 of exon 4 of SYT 10
gttacacactttttgtgaaagaactaaatcagtagagaaagaaattaaaatataaacccaagttcaaagacaatctacttgataatacctttcaaaaatgccatagtgataatgtaaactaaagaggtgtttagaacactttagttggtaattttttttcctacttttatagtgccccaggcttcccaggtggtgctagtggtaaagaacacacctgtcaatgcaagagacatagagatgctggtttaatcttgggaagatcccctggagaagaaaatggccacctactccagtattcttgcctggagaatcccatggacagaggagcctggcgggctacagtccatgggttcacaaagagtcggacacaactgaagtgacttagcatatagtgccccacaacagacaaatgaacttaataattcagtagccattcataatttcagctatatggcatgttattttggtaatgtccccattagccaattgtgaacatacctgatgagccagtgacatccatagccttcaggtttctgcacttgatgacggtcaatgtcatacgtccagcagttggcaaataacaaagggaaaacatgatttcacccagatctatactttcctagaaaggaaataagtaacattagcaatttaaaacaccagatagtgaaaaaaaaaattactgctgagtaaaaaaaatcactttaatggactatttgaattccattttaaatttttttattgaggatatatgttacaatgcaaaaatgctctaataaacaggtaagaaaagagagtatatcgcaggtggtattttgatatatctacttgtatttctaaccagaatctcaaacttaatacagtcagaataagactgctggttctacttatttgcaaacatttactaaaaccagttcctctgtcatctttccaaaatcaggaaatggtatcttaattcatccagaggttgcagttaaaaacctagcacttacttttattcttctttttctctcacccctaacacatccaatccacatcttgcctacattatctataaaacatatctgaaattactgacattctttgcagctctattactattaatctcatggaagccactttcactttttatcaggattactgcaaagattaatcagaagcagtcagtgtggtgacttatgaaatgcaaaccacattatctcactttcctgcttaaaatcatctaaacagctggtatatctaggaaattccagattaataccttttgtcctggtataattatccagaatatctctgtctattattaaatatgtctttgtttagataatgtattacaaagtcattcacataggccccatgtgatctggtctcatctatcactctattaatctcttgccccttcctcagttcactctcatgtaggccaaaagcctttttctcagttattcatcagatggtgtttgtgcttttgacttttgcattttctttttctctcccataactttatatggctgactcagctcaccatatagggctcagctcaaaaaaaaatctcttcagtgaggccttcctccttcctatcctatacccaccctaatcacagattcttcacattttttcatagcactaagcatcatcagaattatcttttaaattcatttttcatttccccgactcccatatgtaaggtctaagggaatatagatcttatctatcttatttttgtaacctagtgaaagtacatagctgactttcagtgcagtttctaaggaatgaaaatactattaattaatctggataaaaatctgaacagctttgcttcatttgtaaagtaaaactgtccatagtatcctggaatagataaatttgctgtcaaagtctgcatagatggtggacaaatgaaaatgagtgtgaacaatgcacattctggatgcttctcaaaaagttgtttacaggagttaaattaaattattcctggttagaaaatctgtggtagatttaatatggggaagaacaagttgctattcattcaggttcataaaacttggttcttaaaaatttttcatgaaacactattaacatttattggactaattcttacaattcaagttctgatctatgtaattcccatttctttattcatggtctagaattagtgttagttgctcagtcatgtctgactcttttctaccccatggactatgcacaatagccaaccaggctcctcagttcatggaattatccaggcatgaatatggagtggatagccattcacttctccagcggatcttcctgacccaaggacagaacctggggttcctgcattgcaggcagattctttaccttctgaaccatcaggcctagcaattaagagcataaatattagagtcagctaaagttgcactgactcctgttttctccttctgagctgtgagatcctaggaaatttaattaagctttgaatctcggaaatttcattttcagattgaagaaaatatcctccccacaggggttttaatcagtaattgagataatgtaaataaagttcaaggcatttaacaaagtgtctggcatatgataaggcatgctgttttgttcattgctgtattgctatcacatggagcaatgtcttaacacatatcaggcgctcataaatattggataagtgaaaaaaataaatagaagaattattatttttaaaaaagggtaagaaaataattattttaaaacaaaagtatatccaaatggctctcctctgggttgtttgctgcacacttaaaagagcaagaaagatctaaaaggagaagcctgaggaaaacaggaaggtacagcctcctacaggactcattcttttccctaccaagaaaatattgagcattatttgttaggtacactggtaggtgctatagatactaaaagagagatggcatgattctgcccttgaagatctcagctgaggaggaagtcagtatataagactataaacagctaataaaataagtctgaatttatttatctgattctttacttattctcttttccaagaatttctttaggctcagttaatgggttaaaattctttgtctgtagcccatccttctttccttttctggatgtttgtcctcccaggaactatcaatcagagtaggcactttttgttgaaagctggtaaaaattaaagtgctgttaaactgctgtactcaatatgccagcaaatttggaaaactcaaaagtggccataggactggaaaaggtaagttttcaatccaatcccaaagaagggcaatgccaacgaatgttcatactactacacaattgcactcatttcacacgctagcaaagtaatgctcaaaattctccaagctaggtttcaacagtacataaaccgagaacttccagatgtycaagttggatttagaaaaggcaaaggaaccagggatcaaattgtcaacatctattggatcattgaaaagtcaagagttccagaaaaacatcttctgcttcattgattatgctaaaacctttaacagtgtggatcaaaaaattgtggaaaatttttaaagagatgggaataacagatcaccttacctgcctcctgagaaa

SEQ ID NO: 1633 - DNA, 206 bp, Bos sp.
gaacatcatgggcataaaaagtttctttctgtttcctataacctccaaacattataatatagaaagatacaaacaataaatacaatcaaattatacttctwgtgtggatttttcacacatatatataagaaagaaaaatagcctagacattccctgaaatagcattgattctgactactgttgtgataaggccacaacaattactg

SEQ ID NO: 1634 - DNA, 201 bp, Bos sp.
tcttacaattcaagttctgatctatgtaattcccatttctttattcatggtctagaattagtgttagttgctcagtcatgtctgactcttttctaccccayggactatgcacaatagccaaccaggctcctcagttcatggaattatccaggcatgaatatggagtggatagccattcacttctccagcggatcttcctga

SEQ ID NO: 1635 - DNA, 201 bp, Bos sp.
cacagtgacaattttcttaatccattggaataaagggcttatgaataaaagctaacactagggtcaggttagacactgtatctttgatttcttttacctgsttccacagacatagagctggagagatcaagataattaatgactggctgcagtcaacttctgaaacatagtcacatttataaagttcttgtgtgtactgtc
